(19) United States
(12) Patent Application Publication
(10) Pub. No.: US 2005/0266432 A1
(43) Pub. Date: Dec. 1, 2005

(54) Haplotype markers for diagnosing susceptibility to immunological conditions

(75) Inventors: Arnold Oliphant, Poway, CA (US); Sarah Murray, Carlsbad, CA (US)

Correspondence Address: FOLEY & LARDNER, P.O. BOX 80278, SAN DIEGO, CA, 92138-0278, US

(73) Assignee: Illumina, Inc.

(21) Appl. No.: 11/069,908

(22) Filed: Feb. 28, 2005

Related U.S. Application Data
(60) Provisional application No. 60/547,823, filed on Feb. 26, 2004.

(51) Int. Cl. C12Q 1/68

(52) U.S. Cl. 435/6

(57) ABSTRACT

The invention provides a method of identifying a SNP haplotype that correlates with an HLA type, MHC allele or susceptibility to a particular disease or condition including the steps of (a) providing the identity of the nucleotide for each of a set of single nucleotide polymorphism (SNPs) in the major histocompatability complex (MHC) region in a population of individuals; (b) providing the HLA type, MHC allele, or susceptibility to the particular disease or condition for the individuals; and (c) identifying a SNP haplotype in the population that correlates with the HLA type, MHC allele or susceptibility to the particular disease or condition, wherein the SNP haplotype includes the SNPs in the MHC region. The invention further provides a method for predicting an HLA type, MHC allele or susceptibility to a particular disease or condition of an individual including the steps of (a) providing the identity of a plurality of SNPs in one or more nucleic acids from the individual that correlate with an HLA type, MHC allele or susceptibility to a particular disease or condition; and (b) predicting the HLA type, MHC genotype or susceptibility to a particular disease or condition for the individual based on a SNP haplotype comprising the plurality of SNPs. The invention also provides SNPs and oligonucleotide probes that are useful for identifying haplotypes associated with a particular disease or condition or with the presence of particular protein variants involved in immunological recognition. The SNPs and probes are also useful for predicting HLA-type, HLA genotype or susceptibility to a particular disease or condition.

### CROSS-REFERENCE TO RELATED APPLICATIONS

[0001] This application claims priority of U.S. Provisional Application Ser. No. 60/547,823, the entire contents of which are hereby incorporated by reference thereto.

### FIELD OF THE INVENTION

[0002] The present invention relates generally to the field of genetic analysis. In particular the method relates to determining HLA-type and to predicting susceptibility to immunological or inflammatory conditions.

### BACKGROUND OF THE INVENTION

[0003] The following description of the background of the invention is provided simply as an aid in understanding the invention and is not admitted to describe or constitute prior art to the invention.

[0004] The major histocompatability complex (MHC) is a large genomic region that contains a series of linked genes that have critical roles the presentation of antigens to T-cells and in the recognition and discrimination between “self” and “non-self” molecules by T-cells. In humans, the MHC spans approximately 4 Mb and is located on the short arm of chromosome 6. The most extensively studied genes in the human MHC are the genes encoding the human leukocyte antigen (HLA) proteins. These proteins anchor in cell membranes and present antigenic peptides to the T lymphocytes resulting in the initiation of specific immune responses. The HLA proteins are encoded by two classes of genes, HLA class I and HLA class II. Class I HLA genes include HLA-A, HLA-B and HLA-C, and class II HLA genes include HLA-DR, HLA-DQ, HLA-DQB1, and HLA-DP.

[0005] Allelic variations in MHC genes have been shown to have associative or causal relationships with relative risk or predisposition to hundreds of diseases, especially diseases with immunological or inflammatory origin. Accordingly the identification of MHC alleles, or HLA-type, in an individual can be a powerful tool for predicting the individual's susceptibility to certain diseases and can also be used in disease diagnosis. Examples of diseases that have been implicated with MHC allelic variation include inflammatory bowel disease (IBD), ulcerative colitis, Crohn's disease, rheumatoid arthritis, diabetes, type I diabetes mellitus (IDDM), myasthenia gravis, vitiligo, Graves' disease, Hashimoto's disease, Addison's disease, autoimmune gastritis and autoimmune hepatitis, rheumatoid disease, systemic lupus erythematosus (SLE), progressive systemic sclerosis and variants, polymyositis, dermatomyositis, pernicious anemia including some of autoimmune gastritis, primary biliary cirrhosis, autoimmune thrombocytopenia, Sjogren's syndrome, multiple sclerosis (MS), Reiter's syndrome and psoriasis.

[0006] HLA molecules play a central role in the recognition and subsequent rejection of transplanted tissues. As such, HLA-typing is used to identify favorable donor-recipient pairs for grafting bone marrow and for solid organ transplantation. The numerous alleles of HLA genes in the population also make HLA typing useful for paternity testing.

[0007] Currently, HLA typing is performed using serological or molecular methods which are laborious and/or expensive. Serological-based HLA typing has traditionally been the predominant method for donor-recipient tissue matching for tissue transplantation. Serological detection of HLA class I and II antigens has been accomplished using a complement mediated lymphocytotoxicity test with purified T or B lymphocytes. This procedure is predominantly used for matching HLA-A and -B loci, and currently is often used only as an initial step in HLA-typing.

[0008] Molecular-based tissue typing can often be more accurate than serologic testing. Low resolution molecular methods such as SSOP (sequence specific oligonucleotide probes) methods, in which PCR products are tested against a series of oligonucleotide probes, can be used to identify HLA antigens, and currently these methods are the most common methods used for Class II-HLA typing. High resolution techniques such as SSP (sequence specific primer) methods which utilize allele specific primers for PCR amplification can identify specific MHC alleles, however these methods can be extremely laborious and expensive.

### SUMMARY OF THE INVENTION

[0009] The present invention provides methods and compositions for identifying genetic markers associated with HLA alleles and alleles of other loci in the MHC region. The methods are generally useful for identifying genetic markers for alleles associated with the expression of proteins involved in immunological recognition. Such methods are useful for predicting the presence of alleles associated with an immunological or inflammatory condition. In particular embodiments, the present invention pertains to the identification of SNPs in the major histocompatibility complex (MHC) that correlate with HLA alleles that are transplantation or disease related. The invention also pertains to methods for identifying SNPs in the major histocompatibility complex (MHC) that correlate to alleles that are causal to or associated with an immunological or inflammatory condition.

[0010] The invention provides a method of identifying a SNP haplotype that correlates with an HLA type. The method can include the steps of (a) providing the identity of the nucleotide for each of a set of single nucleotide polymorphisms (SNPs) in the major histocompatability complex (MHC) region in a population of individuals; (b) providing the HLA type for the individuals; and (c) identifying a SNP haplotype in the population that correlates with the HLA type, wherein the SNP haplotype includes the SNPs in the MHC region.

[0011] The invention further provides a method for predicting the HLA type of an individual. The method can include the steps of (a) providing the identity of a plurality of SNPs in one or more nucleic acids from the individual that correlate with an HLA type; and (b) predicting the HLA type of the individual based on a SNP haplotype comprising the plurality of SNPs.

[0012] In related aspects, the invention provides a method of identifying a SNP haplotype that predicts an HLA type. The method can include the following steps (a) determining the identity of the nucleotide for each of a set of single nucleotide polymorphisms (SNPs) in the major histocompatability complex (MHC) region in a population of individuals; (b) determining the HLA type for said individuals; and (c) identifying a SNP haplotype by correlating SNP genotypes with HLA type in said population, wherein an SNP haplotype that predicts HLA type is identified. In other related aspects the invention provides a method for identifying genetic markers for predicting HLA alleles. The method can involve (a) determining the identity of the nucleotide for each of a set of single nucleotide polymorphism (SNPs) in the major histocompatability complex (MHC)in a population of individuals typed for transplantation related or disease related HLA alleles; and (b) identifying one or more SNP genotypes in the population that correlate with particular HLA transplantation related or disease related alleles. In another aspect the invention provides a method for determining the HLA type of a patient. The method involves (a) determining in nucleic acids from the patient the genotype for each of a panel of SNPs that correlate with transplantation related or disease related HLA alleles; and (b) determining the HLA alleles that correlate with the identified SNP genotypes wherein the SNPs that correlate with transplantation related or disease related HLA alleles are identified using the method described above.

[0013] Also provided is a method of identifying a SNP haplotype that correlates with an allelic variant of an MHC gene. The method can include the steps of (a) providing the identity of the nucleotide for each of a set of single nucleotide polymorphisms (SNPs) in the major histocompatability complex (MHC) region in a population of individuals, wherein the set of SNPs includes a SNP that is outside of the translated region(s) of an MHC gene; (b) providing the presence or absence of the allelic variant of an MHC gene in the individuals; and (c) identifying a SNP haplotype in the population that correlates with the allelic variant of an MHC gene, wherein the SNP haplotype includes the set of SNPs in the MHC region.

[0014] The invention also provides a method for determining the presence or absence of an allelic variant of an MHC gene in an individual. The method can include the steps of (a) providing the identity of a plurality of SNPs in one or more nucleic acids from the individual that correlate with MHC genotype, wherein the set of SNPs includes a SNP that is outside of the translated region(s) of the MHC gene; and (b) determining the MHC genotype of the individual based on a SNP haplotype including the plurality of SNPs.

[0015] The invention further provides a method for identifying a SNP haplotype that correlates with susceptibility to a disease. The method can include the steps of (a) providing the identity of the nucleotide for each of a set of single nucleotide polymorphism (SNPs) in the major histocompatability complex (MHC) region in a population of individuals; (b) providing susceptibility to the disease for the individuals; and (c) identifying a SNP haplotype in the population that correlates with the susceptibility to the disease, wherein the SNP haplotype includes the SNPs in the MHC region.

[0016] Also provided is a method for determining the susceptibility of an individual to a disease. The method can include the steps of (a) providing the identity of a plurality of SNPs in one or more nucleic acids from the individual that correlate with susceptibility to the disease; and (b) determining the susceptibility of the individual to the disease based on a SNP haplotype including the plurality of SNPs.

[0017] In yet another aspect, the invention provides a method for predicting whether a patient is a carrier of an allele associated with an immunological or inflammatory condition, said method comprising (a) evaluating linkage disequilibrium (LD) for at least one SNP in a region of the major histocompatability complex and at least one HLA allele associated with or causal to a immunological or inflammatory condition in a population of individuals, wherein said population comprises individuals that are carriers of said HLA alleles and individuals that are not carriers of said HLA alleles; (b) determining the LD for the at least one SNP and the at least one HLA allele in said patient to and correlating said LD to the results of step (a) to predict whether said patient carries one or more of said HLA alleles.

[0018] In related aspects the invention provides a method for identifying genetic markers for predicting the presence of alleles associated with an immunological or inflammatory condition. The method can include (a) determining the identity of the nucleotide for each of a set of single nucleotide polymorphism (SNPs) in the major histocompatability complex (MHC) in a population of individuals, wherein said population comprises individuals known to carry an allele causal to or associated with an immunological or inflammatory condition and individuals wherein said allele is absent; (b) identifying one or more SNP genotypes in the population that correlate with the presence or absence of said allele in said individuals to identify a one or more SNP genotypes that correlate with said allele causal to or associated with an immunological or inflammatory condition. In certain aspects the invention provides a method for predicting the presence of alleles associated with an immunological or inflammatory condition in a patient by (a) determining in nucleic acids from the patient the genotype for each of a panel of SNPs that correlate with alleles associated with an immunological or inflammatory condition; and (b) determining the alleles alleles associated with an immunological or inflammatory condition that correlate with the identified SNP genotypes.

[0019] The invention also provides a haplotype map; that has one or more SNPs wherein said SNPs are in the MHC region between the RFP gene and the MLN gene of human chromosome 6. The SNPs can span the MHC region at an average density of at least SNPs per 15 kb of genomic DNA, and wherein the SNPs include genotypes that together can correlate with a specific HLA-type. It will be understood that the density of SNPs can be greater in or around a particular translated region of an MHC gene.

[0020] In another aspect, the invention provides a SNP haplotype for predicting HLA type, HLA genotype, or susceptibility of an individual to a disease or condition such as an immunological or inflammatory condition. The SNP haplotype can include at least 4 SNPs in the MHC region In yet another aspect the invention provides a set of oligonucleotide probes for detecting one or more SNPs of a SNP haplotype. The set of SNPs can include at least 4 SNPs in a the MHC region.

[0021] The invention also provides a set of SNPs for HLA-typing or for predicting susceptibility of an individual to an immunological or inflammatory condition. The set of SNPs of the invention may comprise at least about 4, or at least about 10, or at least about 100, or at least about 1,000, or more than 1, 000 SNPs in a region of the major histocompatability complex (MHC). In some preferred embodiments the SNPs of the set of SNPs of the invention cover the MHC region at a an average density of at least at least 1 SNP locus per 15 kb of genomic DNA or 1 locus/10 kb, 1 locus/8 kb, 1 locus/5 kb, 1 locus/2 kb, 1 locus/1.5 kb, 1 locus/1.2 kb, 1 locus/1 kb, 1 locus/ 0.5 kb or higher. In certain aspects a set of SNPs of the present invention comprise at least about 10, at least about 50, at least about 100, at least about 500 or more than 500 SNPs of the SNPs listed on Table 1.

[0022] In other aspects the invention provides a set of oligonucleotides for detecting a set of SNPs. The oligonucleotides of the present invention may comprise one or more oligonucleotides selected from the group consisting of the oligonucleotides shown on Table 2. In certain embodiments the set of oligonucleotides of the invention may comprise at least about 10, at least about 50, at least about 100, at least about 500, at least about 1000, at least about 2000 or more than 2000 of the oligonucleotides shown on Table 2.

[0023] As used herein, the terms “single nucleotide polymorphism” or “SNP” are intended to mean a location of genomic DNA sequence variation in a population of individuals, wherein the location is occupied by one of at least two different nucleotides. The term is used herein consistent with its meaning in the related art. Typically, a SNP is binary having two variants in a population such as G/A, G/T, G/C, A/T, A/C or C/T. However, a SNP can have more than two variants such as three or four variants. The location of a SNP in a genome sequence can be identified, for example, according to a sequence, flanking one or both sides of the SNP, that is the same or similar for individuals that have different SNPs. The flanking sequence can be any length sufficient to identify the SNP including, for example, at least about 10, 25, 50, 75, 100, 125, 150 or 200 nucleotides. A SNP can also be located according to coordinates in a particular genome sequence such as a genome build available from the National Center for Biotechnology Information (NCBI) or other source. A SNP can be located in a coding or non-coding region of a gene.

[0024] The term “haplotype” as used herein, refers to a set of alleles for two or more linked loci on a chromosome that tend to be inherited together in an individual or population of individuals. The loci can be, for example, SNPs or other genetic markers, such as RFLPs, that are commonly inherited. SNPs that are more uniquely associated with a particular haplotype are known in the art as “tag SNPs.”

[0025] As used herein, the term “MHC haplotype” refers to a set of alleles for two or more loci in the MHC region that tend to be inherited together. An “HLA haplotype” is understood to include HLA alleles and, because HLA alleles are found in the MHC region, is a species of an MHC haplotype. A “SNP haplotype” as used herein, refers to a set of SNPs for two or more linked loci on a chromosome that tend to be inherited together.

[0026] As used herein, the term “disease related MHC alleles” refers to genetic alleles in the MHC region that are associated with or causal to particular diseases or conditions. As set forth in further detail below, MHC alleles can be associated with an immunological condition, autoimmune disease, or schizophrenia among other conditions.

[0027] The term “allelic variant” as used herein, refers to a specific nucleotide or sequence variation at a genetic locus. Examples of such nucleotide variations can include mutations, deletions, duplications or SNPs. In certain embodiments an allelic variant of the invention may be in the promoter region or in the coding region of a gene. In some embodiments, an allelic variant of the invention are in a gene in the MHC region. Accordingly, a genetic locus useful in the invention can be within, for example, a gene, exon, intron, transcribed region, translated region, untranslated region or region of a genome having one or more other annotations or functions. In certain preferred embodiments, an allelic variant of the invention may be associated with a specific phenotype. In preferred embodiments an allelic variant of an MHC gene of the invention may be associated with or causal to a specific phenotype, for example, a histocompatibility phenotype or a phenotype associated with susceptibility to disease. An allelic variant of an MHC gene may be a disease related MHC allele. In some embodiments an allelic variant of an MHC gene may be an HLA haplotype. In other embodiments an allelic variant of an MHC gene may be a “histocompatibility related allele”. As used herein, the term “histocompatibility related allele” refers to alleles that are associated with or causal to recognition of immunologic similarity (or identity). Such recognition mediates, for example, heterograft rejection, successful homograft transplantation, and blood transfusion compatibility. HLA alleles or MHC alleles can contribute to the histocompatibility between individuals and may be used to determine favorable donor-recipient pairs for tissue transplants or blood transfusions.

[0028] The term “HLA-type” refers to the complement of HLA antigens present on the cells of an individual. An individual's HLA-type may be used to predict favorable donor-recipient pairs for tissue transplant or blood transfusion or may be used as an indicator of the individual's susceptibility to certain diseases or conditions. In particular, an individual's HLA serotype can be used to predict compatibility between a blood transfusion donor and recipient. An HLA-type can be determined according to the proteins expressed from particular alleles of genes in the MHC region; for example an HLA-type can refer to specific HLA class I proteins or HLA class II proteins. In certain embodiments, genes that may be represented in an HLA-type include one or more genes selected from the group consisting of HLA-A, HLA-B, HLA-Cw, HLA-DR, HLA-DQ and HLA-DP. Terminology for specific HLA-types is usually expressed in accordance with reports released by the World Heath Organization Committee on Nomenclature.

[0029] The term “HLA gene” as used herein, refers to a genomic nucleotide sequence that expresses an HLA class I or HLA class II proteins. Class I HLA genes include HLA-A, HLA-B and HLA-C, and class II HLA genes include HLA-DR, HLA-DQ, HLA-DQB1, and HLA-DP. The genes include a coding region which is a portion of the genomic sequence that is transcribed into mRNA and translated into a protein product. The genes further include portions of the genomic sequence that regulate expression of particular protein products.

[0030] The term “linkage disequilibrium” as used herein, refers to a pattern of inheritance wherein alleles at genetically linked loci are transmitted together in individuals more frequently than would be expected by chance. When the observed frequencies of haplotypes in a population does not agree with haplotype frequencies predicted by multiplying together the frequency of individual genetic markers in each haplotype then linkage disequilibrium is said to occur. Also known in the art as “allelic association,” linkage disequilibrium is generally a function of the distance on a chromosome between loci. For example, when alleles at two distinctive loci occur in gametes more frequently than expected given the known allele frequencies and recombination fraction between the two loci, the alleles are said to be in linkage disequilibrium.

[0031] The term “haplotype map” as used herein, refers to a collection of genetic loci that are useful for describing common patterns of genetic variation. A haplotype map usually comprises specific genetic loci that are representative of certain haplotypes. Haplotype maps can show the extent of linkage disequilibrium in a specific region of the genome. A haplotype map can be used to identify chromosome regions that have SNPs that are strongly associated and to identify chromosomal regions where associations among SNPs are weak. Thus a haplotype map can be useful for identifying specific SNPs in regions of a chromosome with strong SNP associations that can be used to predict certain haplotypes.

### DETAILED DESCRIPTION OF THE INVENTION

[0032] The present invention relates to methods of identifying a haplotype of SNPs or other genetic markers that correlates with proteins involved in immunological recognition such as proteins encoded by the MHC region including, but not limited to, HLA proteins. Different variants of proteins involved in immunological recognition, such as HLA proteins, can be associated with different genetic markers such as SNPs. Thus, in particular embodiments, a method of the invention can be used to predict the HLA type of an individual based on correlation to a haplotype. A correlation identified in a method of the invention can allow unique identification of a particular HLA type such that it can be distinguished from other HLA types. Thus, a haplotype identified in a method of the invention provides a surrogate marker for HLA type allowing a genetic analysis to be used to augment or replace traditional HLA typing methods. Similarly, the methods can be used to correlate a haplotype with other phenotypes and a genetic analysis can be used to augment or replace traditional methods of determining the phenotype. Exemplary phenotypes include, but are not limited to those set forth in further detail below.

[0033] The invention further provides a method of identifying a haplotype that correlates with an HLA genotype. A haplotype identified in a method of the invention need not be limited to alleles for loci that are located in the coding region of an MHC region. Thus, an advantage of the invention is that one or more alleles that are outside of the coding region of an MHC gene can be used to predict an HLA genotype. Because an HLA genotype can be indicative of HLA type or other phenotypes such as predisposition to disease or tissue compatibility, the methods provide for increased accuracy in diagnostic or prognostic applications. Furthermore, the invention can be used to identify a haplotype that correlates with predisposition to disease or tissue compatibility whether or not an associated HLA genotype is known.

[0034] A method for correlating a haplotype with a particular genotype or phenotype can be carried out using a population of individuals. Sequence information for one or more individuals can be provided in a method of the invention by carrying out known sequencing methods using genetic material obtained from the individual. Alternatively or additionally, sequence information can be provided in the form of an information storage medium such as a computer readable memory, hard copy (such as paper and other written media), a computer network or database. Similarly, phenotype information for one or more individuals can be provided in the form of an information storage medium or by carrying out known methods of determining phenotype by evaluating the individual. For example, HLA type can be determined using methods described in the background section above. For each individual the genotype or phenotype can be determined using a diagnostic or research method.

[0035] A haplotype that has been correlated with a particular genotype or phenotype is useful for predicting whether an individual, who was not necessarily included in the population for which the correlation was identified, has the phenotype or genotype. Thus, the invention provides a method of predicting a genotype or phenotype for an individual by determining the presence of a particular haplotype in the genome of the individual. Exemplary genotypes that can be predicted in an individual include, without limitation, MHC genotype or HLA genotype and exemplary phenotypes include, but are not limited to, histocompatibility, susceptibility to a particular disease or condition, the presence of particular MHC proteins or the presence of particular HLA proteins.

[0036] The present invention also relates to methods for identifying genetic markers that correlate with the presence of alleles associated with immunological or inflammatory conditions. The present invention provides a haplotype map for predicting whether a patient has an allele associated with immunological or inflammatory conditions. In certain aspects the invention provides a set of SNPs for predicting susceptibility of an individual to immunological or inflammatory conditions. Exemplary SNPs are listed in Table 1. The invention also provides a set of oligonucleotide probes. The oligonucleotide probes are particularly useful for identifying HLA alleles and HLA-haplotypes. Exemplary probes are listed in Table 2.

[0037] The invention provides a method of diagnosing or predicting susceptibility to an immunological condition or inflammatory condition by determining the presence or absence of a haplotype, wherein the presence of the haplotype is diagnostic or predictive of the immunological condition or inflammatory condition. Typically, the haplotype will have at least one SNP. The SNP can be located in the MHC region. The SNP can be located at a genomic location outside of an HLA gene.

[0038] The invention further provides a method of determining HLA-type by determining the presence or absence of a haplotype, wherein the presence of the haplotype is associated with the HLA-type. Typically, the haplotype will have at least one SNP. The SNP can be located in the MHC region. The SNP can be located at a genomic location outside of an HLA gene.

[0039] Also provided is a method of identifying a diagnostic haplotype for an immunological condition or inflammatory condition. The method includes the steps of (a) evaluating linkage disequilibrium for at least one SNP and at least one HLA allele in a population of individuals, wherein the HLA allele is associated with an immunological condition or inflammatory condition; and (b) determining that the at least one SNP is in linkage disequilibrium with the at least one HLA allele, thereby identifying a diagnostic haplotype for the immunological condition or inflammatory condition, wherein the diagnostic haplotype has the at least one SNP and the at least one HLA allele. The SNP can be located in the MHC region. The SNP can be located in a gene other than an HLA gene.

[0040] An HLA allele useful in a method of the invention can be an allele of a class I gene including, for example, HLA-A, HLA-B or HLA-C. An HLA allele useful in a method of the invention can be an allele of a class II gene including, for example, HLA-DRB 1, HLA-DQA1, HLA-DQB1, HLA-DPA1 or HLA-DPB1.

[0041] A haplotype useful in a method of the invention can include one or more of the single nucleotide polymorphisms (SNPs) listed in Table 1. Table 1 shows a list of single nucleotide polymorphism (SNP) loci that can be used in various combinations to diagnose or predict susceptibility to an immunological condition. All loci were identified on Homo sapiens chromosome 6 as identified in genome build version 33 of a diploid set of chromosomes (available from the NCBI, the website of which is located on the worldwide web at ncbi.nlm.nih.gov) The first column indicates the name of the SNP from dbSNP, the version of dbSNP being listed in column 3. The coordinates locating each SNP on chromosome 6 (build 33) are listed in column 2.

[0042] A candidate list of SNPs for use in the methods of the invention may be selected by mining known public databases (dbSNP;http://www.ncbi.nlm.nih.gov/projects/SNP/) for SNPs in the MHC region. In certain embodiments the SNPs are selected from the MHC region defined by the region flanked by genes Ret Finger Protein (RFP) to Motilin (MLN) designated by the NCBI genome assembly build 33 coordinates from 28,933,330 to 33,773,208. A region that is useful in the invention can include sequences flanking the MHC region, if desired, including, for example, the region that spans 10 kb past the RFP and MLN genes which is from the build 33 coordinates of 28,923,330 to 33,783,208. Those skilled in the art will recognize that smaller regions within these coordinates or larger regions including these coordinates or portions of both can be used in the invention in accordance with the methods exemplified for the region flanked by the RFP and MLN genes. In certain preferred embodiments of the invention, a subset of all SNPs in a particular region, such as the MHC region may be identified and selected for the method based on 2 different criteria; (1) SNPs within 10 kb of coding sequence to all genes in the MHC region may be chosen with higher density of SNPs chosen around the HLA genes, and (2) other densely spaced SNPs (1 SNP every 1-2 kb) can be chosen for uniform spacing throughout the MHC region. In preferred embodiments, these two criteria are used to choose SNPs as candidates (or a “database” of candidate SNPs) to determine haplotypes in the MHC region.

[0043] A haplotype useful in the invention can include at least 1, 2, 3, 4, 5, 10, 20, 30, 40, 50, 75, 100, 200, 400, 600, 800, 1000, 1500, 2000, or more SNPs including, for example, one or more of those listed in Table 1 or otherwise disclosed herein. A haplotype can further include one or more other genetic loci such as a deletion, insertion, mutation, rearrangement or the like. A particularly useful genetic locus that can be included in a haplotype is a causal allele. A causal allele is a mutation or polymorphism in a gene that renders an individual susceptible to a particular condition. It will be understood, however, that a haplotype useful for diagnosing or predicting susceptibility to a particular condition need not include a causal variant, so long as the haplotype is associated with the condition or a symptom of the condition.

[0044] In particular embodiments, genetic loci of a haplotype, such as SNPs, can be distributed at an average density of, for example, at least about 1 locus/15 kb, 1 locus/10 kb, 1 locus/8 kb, 1 locus/5 kb, 1 locus/2 kb, 1 locus/1.5 kb, 1 locus/1.2 kb, 1 locus/1 kb, 1 locus/0.5 kb or higher.

[0045] This disclosure describes methods for building a high density single nucleotide polymorphism (SNP) haplotype map in the major histocompatibility complex (MHC) region. Accordingly, this disclosure provides a haplotype map having at least one SNP in the MHC region. The haplotype map can include a SNP that occurs in a known human leukocyte-antigen (HLA) gene. Alternatively or additionally, the haplotype map can include a SNP that occurs outside of a sequence for a known HLA gene. For example, a SNP useful for a haplotype map of the invention can occur in a sequence that flanks an HLA gene. An advantage of the SNP haplotype map is that it includes “surrogate” markers to known HLA alleles. A haplotype disclosed herein or identified by a method disclosed herein can be used for diagnosis of immune conditions or inflammatory conditions. A haplotype can also be used to identify one or more causative alleles for a disease or condition, thereby aiding in identification of a useful therapy to treat the disease or condition.

[0046] In some embodiments of the invention, selected SNPs may be genotyped in various control populations to determine haplotype structure. Haplotype structures can be determined using various publicly available analysis packages such as Haploview (Bioinformatics. Jan. 15, 2005;21(2):263-5) from either parent-offspring trios or unrelated individuals. Haplotype blocks can be defined using the methods known in the art, such as those described in Gabriel et al. (Science. Jun. 21, 2002;296(5576):2225-9). The various control populations can vary by ethnicity as it is known that haplotype structure and diversity varies by ethnic group. The number of individuals included in a population for identifying a genetic correlation can be chosen according to statistical and genetic methods known in the art. The number can be, for example, at least about 2, 10, 25, 50, 100, 200, 300, 400, 500, 1000 or more individuals.

[0047] In the invention HLA typing may be performed by serological or DNA based typing methods. In preferred embodiments, four-digit HLA types for HLA genes such as HLA-A, HLA-B, HLA-C, HLA-DRB1, DMB1, DQA1, DQB1, and DPB1 are determined by hybridization-based molecular typing methods. Single-block or multi-block SNP haplotypes can be correlated with HLA genotypes. One method for correlating HLA genotypes with SNP haplotypes is the “Leave-one-out” cross-validation as described by Walsh et al. (Am J Hum Genet. September 2003;73(3):580-90). Using this method, one can assess the predictability of an HLA allele with a SNP haplotype. Conversely, one can assess the predictability of a SNP haplotype with an HLA allele.

[0048] The methods of the present invention are useful for diagnosing or predicting susceptibility to a variety of immunological conditions including, for example, an autoimmune disease. As used herein, the term “autoimmune disease” means a disease resulting from an immune response against a self tissue or tissue component, including both self antibody responses and cell-mediated responses. The term autoimmune disease, as used herein, encompasses organ-specific autoimmune diseases, in which an autoimmune response is directed against a single tissue, such as Crohn's disease and ulcerative colitis, Type 1 diabetes mellitus (IDDM), myasthenia gravis, vitiligo, Graves' disease, Hashimoto's disease, Addison's disease and autoimmune gastritis and autoimmune hepatitis. The term autoimmune disease also encompasses non-organ specific autoimmune diseases, in which an autoimmune response is directed against a component present in several or many organs throughout the body. Such autoimmune diseases include, for example, rheumatoid disease, systemic lupus erythematosus (SLE), progressive systemic sclerosis and variants, polymyositis and dermatomyositis. Additional autoimmune diseases include pernicious anemia including some of autoimmune gastritis, primary biliary cirrhosis, autoimmune thrombocytopenia, Sjogren's syndrome, multiple sclerosis (MS) Reiter's disease and psoriasis. One skilled in the art understands that the methods of the invention can be applied to these or other autoimmune diseases, as desired. Exemplary autoimmune diseases include, but are not limited to, inflammatory bowel disease (IBD) Crohn's disease, rheumatoid arthritis or diabetes.

[0049] In certain embodiments SNP haplotypes determined to predict HLA genotypes can be used in association studies of various disease phenotypes such as inflammatory or auto-immune disorders. Association studies include such methods as case/control studies and family-based association studies including the transmission disequilibrium test (TDT) or pedigree disequilibrium test (PDT). Other applications of this method include the use of SNP haplotypes as a diagnostic marker for known HLA alleles (genotypes).

[0050] A haplotype can be diagnostic or predictive of a particular stage or symptom of an immunological condition. In this regard, an autoimmune reaction is directed against the brain in multiple sclerosis and the gut in Crohn's disease. In other autoimmune diseases such as systemic lupus erythematosus, affected tissues and organs may vary among individuals with the same disease. Ultimately, damage to certain tissues by the immune system may be permanent, as with destruction of insulin-producing cells of the pancreas in Type 1 diabetes mellitus. Accordingly, a haplotype can be diagnostic or predictive of tissue damage.

[0051] In a number of autoimmune diseases including, for example, Graves, disease (GD), Rheumatoid Arthritis (RA), myasthenia gravis, insulin-resistant diabetes (Type I), antibodies to cell membrane receptors lead to anti-receptor hypersensitivity reactions that alter cellular function as a result of the binding of antibody to membrane receptors, which can have a stimulatory or a blocking effect. Similarly, in some diabetic patients with extreme insulin resistance, antibodies to insulin receptors have been shown that prevent the binding of insulin to its receptor. An important aspect of Graves' disease concerns the presence in most patients of detectable IgGs directed against the thyroid-stimulating hormone receptor (TSHR). These antibodies can possess stimulatory or blocking activities, and depending on which type predominates, result in either thyroid gland over- or under-activity. Accordingly, a haplotype can be diagnostic or predictive of anti-receptor hypersensitivity reactions.

[0052] The methods of the invention can also be used to diagnose or predict susceptibility to an inflammatory condition. Exemplary conditions include, without limitation, inflammatory lung diseases such as adult respiratory distress syndrome, asthma, emphysema, chronic bronchitis, cystic fibrosis, or interstitial lung disease such as interstitial pneumonitis, idiopathic fibrosis and interstitial fibrosis.

[0053] The methods of the present invention can also be used for diagnosing or predicting susceptibility to schizophrenia.

[0054] A variety of symptoms that are indicative of the above-described conditions or diseases are well known in the art as described, for example, in The Merck Manual of Diagnosis and Therapy 16^{th} Ed., Edited by Berkow, Published by Merck and Co., Inc., Rahway N.J. (1992). A haplotype disclosed herein or identified by a method disclosed herein can be diagnostic or predictive of one or more of such symptoms.

[0055] A method of the invention can include a step of obtaining material containing one or more target nucleic acids having a desired SNP such as one or more of the SNP loci set forth in Table 1. As used herein, the term “material” means any biological matter from which a target nucleic acid can be prepared or isolated. For example, the term material encompasses whole blood, plasma, saliva or other bodily fluid or tissue that contains nucleic acid. A preferred material is whole blood, which can be obtained readily by non-invasive means and used to prepare genomic DNA for detection using a method described herein. Other materials are set forth below in further detail. As used herein, the term “nucleic acid” means a polynucleotide such as deoxyribonucleic acid (DNA) or ribonucleic acid (RNA). The term can include either single-stranded or double-stranded nucleic acid. Total genomic DNA, fragments thereof or amplified representations thereof are particularly useful nucleic acids with which to practice a method of the invention.

[0056] Accordingly, the term “amplified representative” is intended to mean a nucleic acid copy in which the proportion of each sequence in the copy relative to all other sequences in the copy is substantially the same as the proportions in the nucleic acid template. When used in reference to a population of genome fragments, for example, the term is intended to mean a population of genome fragments in which the proportion of each genome fragment to all other genome fragments in the population is substantially the same as the proportion of its sequence to the other genome fragment sequences in the genome. Substantial similarity between the proportion of sequences in an amplified representation and a template genomic DNA means that at least 60% of the loci in the representation are no more than 5 fold over-represented or under-represented. In such representations at least 70%, 80%, 90%, 95% or 99% of the loci can be, for example, no more than 5, 4, 3 or 2 fold over-represented or under-represented. A nucleic acid included in the term can be DNA, RNA or an analog thereof. The number of copies of each nucleic acid sequence in an amplified representative population can be, for example, at least. 2, 5, 10, 25, 50, 100, 1000, 1×10⁴, 1×10⁵, 1×10⁶, 1×10⁷, 1×10⁸ or 1×10¹⁰ fold more than the template or more.

[0057] A target nucleic acid such as genomic DNA can be isolated from material including, for example, one or more cells, bodily fluids or tissues. Known methods can be used to obtain a bodily fluid such as blood, sweat, tears, lymph, urine, saliva, semen, cerebrospinal fluid, feces or amniotic fluid. Similarly known biopsy methods can be used to obtain cells or tissues such as buccal swab, mouthwash, surgical removal, biopsy aspiration or the like. A target nucleic acid having one or more SNP can also be obtained from one or more cell or tissue in primary culture, in a propagated cell line, a fixed archival sample, forensic sample or archeological sample.

[0058] Exemplary cell types from which a target nucleic acid can be obtained in a method of the invention include, without limitation, a blood cell such as a B lymphocyte, T lymphocyte, leucocyte, erythrocyte, macrophage, or neutrophil; a muscle cell such as a skeletal cell, smooth muscle cell or cardiac muscle cell; germ cell such as a sperm or egg; epithelial cell; connective tissue cell such as an adipocyte, fibroblast or osteoblast; neuron; astrocyte; stromal cell; kidney cell; pancreatic cell; liver cell; or keratinocyte. A cell from which target nucleic acid is obtained can be at a particular developmental level including, for example, a hematopoietic stem cell or a cell that arises from a hematopoietic stem cell such as a red blood cell, B lymphocyte, T lymphocyte, natural killer cell, neutrophil, basophil, eosinophil, monocyte, macrophage, or platelet. Other cells include a bone marrow stromal cell (mesenchymal stem cell) or a cell that develops therefrom such as a bone cell (osteocyte), cartilage cells (chondrocyte), fat cell (adipocyte), or other kinds of connective tissue cells such as one found in tendons; neural stem cell or a cell it gives rise to including, for example, a nerve cells (neuron), astrocyte or oligodendrocyte; epithelial stem cell or a cell that arises from an epithelial stem cell such as an absorptive cell, goblet cell, Paneth cell, or enteroendocrine cell; skin stem cell; epidermal stem cell; or follicular stem cell. Generally any type of stem cell can be used including, without limitation, an embryonic stem cell, adult stem cell, or pluripotent stem cell.

[0059] A cell from which a target nucleic acid sample is obtained for use in the invention can be a normal cell or a cell displaying one or more symptoms of a particular inflammatory condition or immunological condition such as an autoimmune disease. Those skilled in the art will know or be able to readily determine methods for isolating target nucleic acid, such as gDNA, from a cell, fluid or tissue using methods known in the art such as those described in Sambrook et al., Molecular Cloning: A Laboratory Manual, 3rd edition, Cold Spring Harbor Laboratory, New York (2001) or in Ausubel et al., Current Protocols in Molecular Biology, John Wiley and Sons, Baltimore, Md. (1998).

[0060] A method of the invention can further include steps of isolating a particular type of cell or tissue. Exemplary methods that can be used in a method of the invention to isolate a particular cell from other cells in a population include, but are not limited to, Fluorescent Activated Cell Sorting (FACS) as described, for example, in Shapiro, Practical Flow Cytometry, 3rd edition Wiley-Liss; (1995), density gradient centrifugation, or manual separation using micromanipulation methods with microscope assistance. Exemplary cell separation devices that are useful in the invention include, without limitation, a Beckman JE-6 centrifugal elutriation system, Beckman Coulter EPICS ALTRA computer-controlled Flow Cytometer-cell sorter, Modular Flow Cytometer from Cytomation, Inc., Coulter counter and channelyzer system, density gradient apparatus, cytocentrifuge, Beckman J-6 centrifuge, EPICS V dual laser cell sorter, or EPICS PROFILE flow cytometer. A tissue or population of cells can also be removed by surgical techniques.

[0061] A gDNA or other target nucleic acid can be prepared for use in a method of the invention by lysing a cell that contains the nucleic acid. Typically, a cell is lysed under conditions that substantially preserve the integrity of the nucleic acid. In particular, exposure of a cell to alkaline pH can be used to lyse a cell in a method of the invention while causing relatively little damage to gDNA. Cells lacking a cell wall either naturally or due to enzymatic removal can also be lysed by exposure to osmotic stress. Other conditions that can be used to lyse a cell include exposure to detergents, mechanical disruption, sonication, heat, pressure differential such as in a French press device, or Dounce homogenization.

[0062] In particular embodiments of the invention, a crude cell lysate containing a target nucleic acid such as gDNA can be directly replicated, amplified or detected without further isolation of the target nucleic acid. Alternatively, a target nucleic acid can be further isolated from other cellular components prior to replication, amplification or detection. Accordingly, a method of the invention can be carried out on purified or partially purified target nucleic acid. Genomic DNA can be isolated using known methods including, for example, liquid phase extraction, precipitation, solid phase extraction, chromatography and the like. Such methods are often referred to as minipreps and are described for example in Sambrook et al., supra, (2001) or in Ausubel et al., supra, (1998) or available from various commercial vendors including, for example, Qiagen (Valencia, Calif.) or Promega (Madison, Wis.).

[0063] A method of the invention can include a step of amplifying a nucleic acid target including, for example, a step of whole genome amplification. Two exemplary approaches to whole genome amplification that can be used in the invention include the use of some form of randomly-primed amplification or creation of a genomic representation amplifiable by universal PCR. Exemplary techniques for randomly-primed amplification include, without limitation, those based upon PCR, such as PEP-PCR or DOP-PCR or those based upon strand-displacement amplification such as random-primer amplification. An exemplary method of creating genomic representations amplifiable by universal PCR is described, for example, in Lucito et al., Proc. Nat'l. Acad. Sci. USA 95:4487-4492 (1998). One implementation of genomic representations is to create short genomic inserts (for example, 30-2000 bases) via restriction digestion of gDNA, and add universal PCR tails by adapter ligation. Further methods of amplification are described, for example, in U.S. Ser. No. 10/600,634, filed Jun. 20, 2003.

[0064] A variety of molecular methods useful for determining the presence or absence of one or more SNPs that make up a haplotype are well known in the art. One skilled in the art understands that, where the presence or absence of a particular haplotype is to be determined, the SNPs of the haplotype can be detected by any combination of molecular methods.

[0065] In particular embodiments, a haplotype can be determined by detecting a plurality of SNPs in a target nucleic acid sample using an array. As used herein, the term “array” refers to a population of different probe molecules that are attached to one or more substrates such that the different probe molecules can be differentiated from each other according to relative location. An array can include different probe molecules that are each located at a different addressable location on a substrate. Alternatively, an array can include separate substrates each bearing a different probe molecule, wherein the different probe molecules can be identified according to the locations of the substrates on a surface to which the substrates are attached or according to the locations of the substrates in a liquid. Exemplary arrays in which separate substrates are located on a surface include, without limitation, those including beads in wells as described, for example, in U.S. Pat. No. 6,355,431 B1, US 2002/0102578 and PCT Publication No. WO 00/63437. Exemplary formats that can be used in the invention to distinguish beads in a liquid array, for example, using a microfluidic device, such as a fluorescent activated cell sorter (FACS), are described, for example, in U.S. Pat. No. 6,524,793. Further examples of arrays that can be used in the invention include, without limitation, those described in Butte, Nature Reviews Drug Discov. 1:951-60 (2002) or U.S. Pat Nos. 5,429,807; 5,436,327; 5,561,071; 5,583,211; 5,658,734; 5,837,858; 5,874,219; 5,919,523; 6,136,269; 6,287,768; 6,287,776; 6,288,220; 6,297,006; 6,291,193; 6,346,413; 6,416,949; 6,482,591; 6,514,751 and 6,610,482; and WO 93/17126; WO 95/11995; WO 95/35505; EP 742 287; and EP 799 897.

[0066] In particular embodiments, probes useful in detecting target nucleic acids can be attached to particles that are arrayed or otherwise spatially distinguished. Exemplary particles include microspheres or beads. It will be understood that particles such as microspheres or beads can be spherical or approximately spherical but need not be perfectly spherical. Rather solid phase particles having other shapes including, but not limited to, cylinders disks, plates, chips, slivers or irregular shapes can be used. In addition, particles used in the invention can be porous, thus increasing the surface area available for attachment or detection of molecules such as probes or targets. Particle sizes can range, for example, from nanometers such as about 100 nm beads, to millimeters, such as about 1 mm beads, with particles of intermediate size such as at most about 0.2 micron, 0.5 micron, 5 micron or 200 microns being useful. The composition of the beads can vary depending, for example, on the application of the invention or the method of synthesis. Typically, useful particles consist of a substantially non-compressible or inelastic material compared to a biological cell such as plastics, ceramics, glass, polystyrene, methylstyrene, acrylic polymers, paramagnetic materials, thoria sol, carbon graphite, titanium dioxide, latex, Teflon™, cross-linked dextrans such as Sepharose™, cellulose, or nylon. However, if desired a biological cell or similarly compressible particle such as a cross-linked micelle can be used as a solid phase support in the invention. Other suitable bead compositions include, but are not limited to, those used in peptide, nucleic acid and organic moiety synthesis or others described, for example, in Microsphere Detection Guide from Bangs Laboratories, Fishers Ind.

[0067] Several embodiments including the use of array-based detection in the invention are exemplified below for beads or microspheres. Exemplary bead-based arrays that can be used in the invention include, without limitation, those in which beads are associated with a solid support such as those described in U.S. Pat. No. 6,355,431 B1, US 2002/0102578 and PCT Publication No. WO 00/63437. Beads can be located at discrete locations, such as wells, on a solid-phase support, whereby each location accommodates a single bead. Alternatively, discrete locations where beads reside can each include a plurality of beads as described, for example, in U.S. patent application Nos. 2004/0263923, 2004/0233485, US 2004/0132205, or US 2004/0125424. Beads can be associated with discrete locations via covalent bonds or other non-covalent interactions such as gravity, magnetism, ionic forces, van der Waals forces, hydrophobicity or hydrophilicity. However, the sites of an array of the invention need not be discrete sites. For example, it is possible to use a uniform surface of adhesive or chemical functionalities that allows the attachment of particles at any position. Thus, the surface of an array substrate can be modified to allow attachment or association of microspheres at individual sites, whether or not those sites are contiguous or non-contiguous with other sites. Thus, the surface of a substrate can be modified to form discrete sites such that only a single bead is associated with the site or, alternatively, the surface can be modified such that a plurality of beads populates each site.

[0068] Beads or other particles can be loaded onto array supports using methods known in the art such as those described, for example, in U.S. Pat. No. 6,355,431. In some embodiments, for example when chemical attachment is done, particles can be attached to a support in a non-random or ordered process. For example, using photoactivatible attachment linkers or photoactivatible adhesives or masks, selected sites on an array support can be sequentially activated for attachment, such that defined populations of particles are laid down at defined positions when exposed to the activated array substrate. Alternatively, particles can be randomly deposited on a substrate. In embodiments where the placement of probes is, random, a coding or decoding system can be used to localize and/or identify the probes at each location in the array. This can be done in any of a variety of ways, for example, as described in U.S. Pat. No. 6,355,431 or WO 03/002979. A further encoding system that is useful in the invention is the use of diffraction gratings as described, for example, in U.S. patent application Nos. US 2004/0263923, US 2004/0233485, US 2004/0132205, or US 2004/0125424.

[0069] An array of beads useful in the invention can also be in a fluid format such as a fluid stream of a flow cytometer or similar device. Exemplary formats that can be used in the invention to distinguish beads in a fluid sample using microfluidic devices are described, for example, in U.S. Pat. No. 6,524,793. Commercially available fluid formats for distinguishing beads include, for example, those used in xMAP™ technologies from Luminex or MPSS™ methods from Lynx Therapeutics.

[0070] Any of a variety of arrays known in the art can be used in the present invention. For example, arrays that are useful in the invention can be non-bead-based. A particularly useful array is an Affymetrix® GeneChip® array. GeneChip® arrays can be synthesized in accordance with techniques sometimes referred to as VLSIPS™ (Very Large Scale Immobilized Polymer Synthesis) technologies. Some aspects of VLSIPS™ and other microarray and polymer (including protein) array manufacturing methods and techniques have been described in U.S. Pat. No. 09/536,841, International Publication No. WO 00/58516; U.S. Pat. Nos. 5,143,854, 5,242,974, 5,252,743, 5,324,633, 5,445,934, 5,744,305, 5,384,261, 5,405,783, 5,424,186, 5,451,683, 5,482,867, 5,491,074, 5,527,681, 5,550,215, 5,571,639, 5,578,832, 5,593,839, 5,599,695, 5,624,711, 5,631,734, 5,795,716, 5,831,070, 5,837,832, 5,856,101, 5,858,659, 5,936,324, 5,968,740, 5,974,164, 5,981,185, 5,981,956, 6,025,601, 6,033,860, 6,040,193, 6,090,555, 6,136,269, 6,269,846, 6,022,963, 6,083,697, 6,291,183, 6,309,831 and 6,428,752; and in PCT Applications Nos. PCT/US99/00730 (International Publication No. WO 99/36760) and PCT/US01/04285.

[0071] A spotted array can also be used in a method of the invention. An exemplary spotted array is a CodeLink™ Array available from Amersham Biosciences. CodeLink™ Activated Slides are coated with a long-chain, hydrophilic polymer containing amine-reactive groups. This polymer is covalently crosslinked to itself and to the surface of the slide. Probe attachment can be accomplished through covalent interaction between the amine-modified 5′ end of the oligonucleotide probe and the amine reactive groups present in the polymer. Probes can be attached at discrete locations using spotting pens. Useful pens are stainless steel capillary pens that are individually spring-loaded. Pen load volumes can be less than about 200 nL with a delivery volume of about 0.1 nL or less. Such pens can be used to create features having a spot diameter of, for example, about 140-160 μm. In a preferred embodiment, nucleic acid probes at each spotted feature can be 30 nucleotides long. However, probes having other lengths such as those set forth elsewhere herein can also be attached at each spot.

[0072] An array that is useful in the invention can also be manufactured using inkjet printing methods such as SurePrint™ Technology available from Agilent Technologies. Such methods can be used to synthesize oligonucleotide probes in situ or to attach pre-synthesized probes having moieties that are reactive with a support surface. A printed microarray can contain 22,575 features on a surface having standard slide dimensions (about 1 inch by 3 inches). Typically, the printed probes are 25 or 60 nucleotides in length. However, probes having other lengths such as those set forth elsewhere herein can also be printed at each location.

[0073] An exemplary high density array is an array of arrays or a composite array having a plurality of individual arrays that is configured to allow processing of multiple samples. Such arrays allow multiplex detection. Exemplary composite arrays that can be used in the invention, for example, in multiplex detection formats are described in U.S. Pat. No. 6,429,027 and US 2002/0102578. In particular embodiments, each individual array can be present within each well of a microtiter plate. Thus, depending on the size of the microtiter plate and the size of the individual array, very high numbers of assays can be run simultaneously; for example, using individual arrays of 2,000 probes and a 96 well microtiter plate, 192,000 assays can be performed in parallel; the same number of probes in each well of a 384 microtiter plate yields 768,000 simultaneous assays, and in a 1536 microtiter plate gives 3,072,000 assays.

[0074] In some embodiments, solid-phase attached probes, such as those having sequences set forth elsewhere herein, can be synthesized by sequential addition of monomer units directly on a solid support such as a bead or slide surface. Methods known in the art for synthesis of a variety of different chemical compounds on solid supports can be used in the invention, such as methods for solid-phase synthesis of peptides, organic moieties, and nucleic acids. Alternatively probes can be synthesized first, and then covalently attached to a solid support, for example, via reactive functional groups. Functionalized solid supports can be produced by methods known in the art or, if desired, obtained from any of several commercial suppliers. Exemplary surface chemistries that are useful in the invention include, but are not limited to, amino groups such as aliphatic and aromatic amines, carboxylic acids, aldehydes, amides, chloromethyl groups, hydrazide, hydroxyl groups, sulfonates or sulfates. If desired, a probe can be attached to a solid support via a chemical linker. Such a linker can have characteristics that provide, for example, stable attachment, reversible attachment, sufficient flexibility to allow desired interaction with a target molecule to be detected, or to avoid undesirable binding reactions. Further exemplary methods that can be used in the invention to attach polymer probes to a solid support are described in U.S. patent application Ser. No. 10/651,568 or Ser. No. 10/739,959; WO 01/41918; WO 04/001646; Pease et al., Proc. Natl. Acad. Sci. USA 91(11):5022-5026 (1994); Khrapko et al., Mol Biol (Mosk) (USSR) 25:718-730 (1991); Stimpson et al., Proc. Natl. Acad. Sci. USA 92:6379-6383 (1995) or Guo et al., Nucleic Acids Res. 22:5456-5465 (1994).

[0075] Very high density arrays are useful in the invention including, for example, those having from about 10,000,000 array locations/cm² to about 2,000,000,000 array locations/cm² or from about 100,000,000 array locations/cm² to about 1,000,000,000 array locations/cm². High density arrays can also be used including, for example, those in the range from about 100,000 array locations/cm² to about 10,000,000 array locations/cm² or about 1,000,000 array locations/cm² to about 5,000,000 array locations/cm². Moderate density arrays useful in the invention can range from about 10,000 array locations/cm² to about 100,000 array locations/cm², or from about 20,000 array locations/cm² to about 50,000 array locations/cm². Low density arrays are generally less than 10,000 particles/cm² with from about 1,000 array locations/cm² to about 5,000 array locations/cm² being useful in particular embodiments. Very low density arrays having less than 1,000 array locations/cm², from about 10 array locations/cm² to about 1000 array locations/cm², or from about 100 array locations/cm² to about 500 array locations/cm² are also useful in some applications.

[0076] A solid-phase support used in an array of the invention can be made from any material that can be modified to contain discrete individual sites or to attach a desired probe. In embodiments where arrays of particles are used, a material that is capable of attaching or associating with one or more type of particles can be used. Useful supports include, but are not limited to, glass; modified glass; functionalized glass; plastics such as acrylics, polystyrene and copolymers of styrene and other materials, polypropylene, polyethylene, polybutylene, polyurethanes, Teflon, or the like; polysaccharides; nylon; nitrocellulose; resins; silica; silica-based materials such as silicon or modified silicon; carbon; metal; inorganic glass; optical fiber bundles, or any of a variety of other polymers. Useful supports include those that allow optical detection, for example, by being translucent to energy of a desired detection wavelength and/or do not themselves appreciably fluoresce at particular detection wavelengths.

[0077] The surface of a solid-phase support can include a plurality of individual arrays that are physically separated from each other. For example, physical separation can be due to the presence of assay wells, such as in a microtiter plate. Other barriers that can be used to physically separate array locations include, for example, gaskets, raised barriers, channels, hydrophobic regions that will deter flow of aqueous solvents or hydrophilic regions that will deter flow of apolar or hydrophobic solvents.

[0078] Arrays that are physically separated from each other provide separate assay locations. An assay location can include an array of probes and provide a vessel for holding a fluid such that the fluid contacts the probes. For example, an assay location containing a multiplex HLA allele detection reaction can be contacted with an array of probes under hybridization conditions set forth herein or known in the art. Similarly, a wash fluid or fluid containing other reagents or analytes described herein can be contacted with an array of probes when placed in an assay location. An assay location can be enclosed, if desired, for example, to form a hybridization chamber. Exemplary enclosures include, without limitation, a cassette, enclosed well, or a slide surface enclosed by a gasket or membrane or both. Further exemplary enclosures that are useful in the invention are described in WO 02/00336, U.S. patent application Pub. 02/0102578 or the references cited previously herein in regard to different types of arrays.

[0079] In a particular embodiment, an array support can be an optical fiber bundle or array, as is generally described in U.S. Ser. No. 08/944,850, U.S. Pat. No. 6,200,737; WO 98/40726, and WO 98/50782. Also useful in the invention is a preformed unitary fiber optic array having discrete individual fiber optic strands that are co-axially disposed and joined along their lengths. A distinguishing feature of a preformed unitary fiber optic array compared to other fiber optic formats is that the fibers are not individually physically manipulable; that is, one strand generally cannot be physically separated at any point along its length from another fiber strand.

[0080] Any of a variety of conditions can be used to hybridize probes with target nucleic acids having SNPs. In particular embodiments, the hybridization conditions can support modification or replication of the probe, target or both. Accordingly, the presence of a particular SNP can be determined based on a detectable property of a target nucleic acid bearing the SNP, a probe that binds to the target nucleic acid or both.

[0081] In particular embodiments, SNPs can be detected based on the presence of the probe, SNP bearing target or both in a hybrid, without subsequent modification of the hybrid species. For example, a pre-labeled gDNA fragment having a particular SNP can be identified based on presence of the label at a particular array location where a nucleic acid complement of the SNP resides.

[0082] Alternatively, arrayed nucleic acid probes can be modified while hybridized to target nucleic acids, thereby allowing detection. Such embodiments include, for example, those utilizing allele-specific oligonucleotide hybridization, allele-specific primer extension (ASPE), single base extension (SBE), oligonucleotide ligation amplification (OLA), rolling circle amplification (RCA), extension ligation (GoldenGate™), invader technology, probe cleavage or pyrosequencing as described in U.S. Pat. No. 6,355,431 B1 or U.S. Ser. No. 10/177,727. Thus, the invention can be carried out in a mode wherein an immobilized probe is modified instead of a target nucleic acid captured by a probe. Alternatively, detection can include modification of the target nucleic acid while hybridized to probes. Exemplary modifications include those that are catalyzed by an enzyme such as a polymerase. A useful modification can be incorporation of one or more nucleotides or nucleotide analogs to a primer hybridized to a template strand, wherein the primer can be either the probe or target in a probe-target hybrid. Such a modification can include replication of all or part of a primed template.

[0083] In one embodiment, a haplotype is associated with a particular condition with an odds ratio of at least 5 and a lower 95% confidence limit of greater than 1. Such an odds ratio can be, for example, at least 5.5, 6.0, 6.5, 7.0, 7.5 or 8.0 with a lower 95% confidence interval limit of greater than 1, such as an odds ratio of at least 8 with a 95% confidence interval of 1.55 to 100. In some cases, it is known that a confidence interval can be higher than 100. Methods for determining an odds ratio are well known in the art (see, for example, Schlesselman et al., Case Control Studies: Design, Conduct and Analysis Oxford University Press, New York (1982).

[0084] In another embodiment, a SNP or haplotype is associated with a condition, such as an autoimmune disease, with a p value of equal to or less than 0.0097. As used herein the term “p value” is synonymous with “probability value.” The expected p value for the association between a random haplotype (or allele) and disease is 1.00. A p value of less than 0.05 indicates that haplotype and disease do not appear together by chance but are influenced by positive factors. A disease-associated haplotype or disease-associated allele can be associated with an immunological or inflammatory disease with, for example, a p value of 0.04, 0.03, 0.02, 0.01, 0.009, 0.008, 0.007, 0.006, 0.005, 0.004, 0.003, 0.002 or 0.001, or with a p value of 0.00095, 0.0009, 0.00085 or 0.0008. It is recognized that, in some cases, p values may need to be corrected, for example, to account for factors such as sample size (number of families, cases or controls), genetic heterogeneity (linked forms and unlinked forms within the particular disease), clinical heterogeneity, or analytical approach (parametric or nonparametric method).

[0085] The invention also provides a composition including a plurality of nucleic acid probes specific for at least one SNP, wherein at least one of the oligonucleotides has a sequence that is complementary to the at least one SNP. In particular embodiments, the plurality of SNPs can include one or more of the SNPs listed in Table 1. Table 2 lists exemplary probes that are useful for detecting the SNPs listed in Table 1 using, for example, a GoldenGate™ assay format. The composition can further include a nucleic acid probe that is specific for another genetic locus such as a causal variant or one or more others set forth above.

[0086] A nucleic acid probe that is complementary to a SNP locus can have any length sufficient to specifically hybridize to a desired SNP in a genomic DNA sample. Exemplary lengths include at least about 10, 15, 18, 20, 23, 25, 30, 35, 40, 45, 50, 55, 60, 65, 70, 75, 80, 85, 90, 95 or 100 nucleotides or more. A nucleic acid probe useful in the invention can have a sequence that is complementary to sequences flanking one or both sides of a SNP locus in a gDNA or amplification product derived from a gDNA. In particular embodiments, a SNP can be identified by hybridization of two or more probes. For example, an oligo ligation assay or GoldenGate™ assay can utilize probes that hybridize to separate portions of the sequence around or over a SNP such that identification of the SNP is based on ligation of the two probes as described, for example, in U.S. Pat. No. 6,355,431 B1 and U.S. Ser. No. 10/177,727. Similarly, PCR methods can be carried out using amplification primers that hybridize to sequences that flank the desired SNP and occur on opposite strands. Thus, a SNP probe of the invention can have 10, 15, 18, 20, 23, 25, 30, 35, 40, 45, 50, 55, 60, 65, 70, 75, 80, 85, 90, 95 or 100 nucleotides that are complementary to a flanking sequence of a SNP.

[0087] A nucleic acid useful in the present invention will generally contain phosphodiester bonds, and can include, for example, DNA or RNA. If desired to suit a particular application, polynucleotide analogs having alternate backbones can be used, including, for example, phosphoramide (Beaucage et al., Tetrahedron 49(10): 1925 (1993) and references therein; Letsinger, J. Org. Chem. 35:3800 (1970); Sprinzl et al., Eur. J. Biochem. 81:579 (1977); Letsinger et al., Nucl. Acids Res. 14:3487 (1986); Sawai et al, Chem. Lett. 805 (1984), Letsinger et al., J. Am. Chem. Soc. 110:4470 (1988); and Pauwels et al., Chemica Scripta 26:141 91986)), phosphorothioate (Mag et al., Nucleic Acids Res. 19:1437 (1991); and U.S. Pat. No. 5,644,048), phosphorodithioate (Briu et al., J. Am. Chem. Soc. 1 11:2321 (1989), O-methylphophoroamidite linkages (see Eckstein, Oligonucleotides and Analogues: A Practical Approach, Oxford University Press), or peptide nucleic acid linkages (see Egholm, J. Am. Chem. Soc. 114:1895 (1992); Meier et al., Chem. Int. Ed. Engl. 31:1008 (1992); Nielsen, Nature, 365:566 (1993); Carlsson et al., Nature 380:207 (1996), all of which are incorporated by reference). Other polynucleotide analogs include those with positive backbones (Denpcy et al., Proc. Natl. Acad. Sci. USA 92:6097 (1995); non-ionic backbones (U.S. Pat. Nos. 5,386,023, 5,637,684, 5,602,240, 5,216,141 and 4,469,863; Kiedrowshi et al., Angew. Chem. Intl. Ed. English 30:423 (1991); Letsinger et al., J. Am. Chem. Soc. 110:4470 (1988); Letsinger et al., Nucleoside & Nucleotide 13:1597 (1994); Chapters 2 and 3, ASC Symposium Series 580, “Carbohydrate Modifications in Antisense Research”, Ed. Y. S. Sanghui and P. Dan Cook; Mesmaeker et al., Bioorganic & Medicinal Chem. Lett. 4:395 (1994); Jeffs et al., J. Biomolecular NMR 34:17 (1994); Tetrahedron Lett. 37:743 (1996)) and non-ribose backbones, including those described in U.S. Pat. Nos. 5,235,033 and 5,034,506, and Chapters 6 and 7, ASC Symposium Series 580, “Carbohydrate Modifications in Antisense Research”, Ed. Y. S. Sanghui and P. Dan Cook. polynulceotides containing one or more carbocyclic sugars can also be used in the invention (see Jenkins et al., Chem. Soc. Rev. (1995) pp 169-176). Several nucleic acid analogs are described in Rawls, C & E News Jun. 2, 1997 page 35. All of these references are hereby expressly incorporated by reference. If desired, these modifications of the ribose-phosphate backbone can be included in a polynucleotide to facilitate the addition of labels, or to increase the stability and half-life of such molecules in physiological environments.

[0088] A nucleic acid useful in the invention can be an isolated nucleic acid prepared using methods well known in the art such that it is removed from at least one coexisting biological component. A nucleic acid can also be synthesized using any of a variety of methods well known in the art including, for example, a method described in U.S. Pat. Nos. 6,121,054 and 6,663,832; WO 00/44491 and U.S. Ser. No. 10/651568.

[0089] A nucleic acid can be single stranded, double stranded or contain portions of both double stranded and single stranded sequence. A nucleic acid can be DNA, such as genomic DNA (gDNA) or copy DNA (cDNA); RNA such as messenger RNA (mRNA), transfer RNA (tRNA), ribosomal RNA (rRNA), antisence RNA (aRNA) or RNA inhibitor (RNAi); or a hybrid, where the nucleic acid contains any combination of deoxyribo- and ribo-nucleotides, and any combination of bases, including uracil, adenine, thymine, cytosine, guanine, inosine, xathanine hypoxathanine, isocytosine, isoguanine, or the like. Particular embodiments utilize isocytosine and isoguanine as is generally described in U.S. Pat. No. 5,681,702.

[0090] In particular embodiments, a nucleic acid probe useful in the invention can include a detection moiety. A detection moiety can be a primary label that is directly detectable or secondary label that can be indirectly detected, for example, via direct or indirect interaction with a primary label. Exemplary primary labels include, without limitation, an isotopic label such as a naturally non-abundant radioactive or heavy isotope; chromophore; luminophore; fluorophore; calorimetric agent; magnetic substance; electron-rich material such as a metal; electrochemiluminescent label such as Ru(bpy)32+; or moiety that can be detected based on a nuclear magnetic, paramagnetic, electrical, charge to mass, or thermal characteristic. Fluorophores that are useful in the invention include, for example, fluorescent lanthanide complexes, including those of Europium and Terbium, fluorescein, rhodamine, tetramethylrhodamine, eosin, erythrosin, coumarin, methyl-coumarins, pyrene, Malacite green, Cy3, Cy5, stilbene, Lucifer Yellow, Cascade Blue™, Texas Red, alexa dye, phycoerythin, bodipy, and others known in the art such as those described in Haugland, Molecular Probes Handbook, (Eugene, Oreg.) 6th Edition; The Synthegen catalog (Houston, Tex.), Lakowicz, Principles of Fluorescence Spectroscopy, 2nd Ed., Plenum Press New York (1999), or WO 98/59066. Labels can also include enzymes such as horseradish peroxidase or alkaline phosphatase or particles such as magnetic particles or optically encoded nanoparticles.

[0091] Exemplary secondary labels are binding moieties. A binding moiety can be attached to a nucleic acid to allow detection or isolation of the nucleic acid via specific affinity for a receptor. Specific affinity between two binding partners is understood to mean preferential binding of one partner to another compared to binding of the partner to other components or contaminants in the system. Binding partners that are specifically bound typically remain bound under the detection or separation conditions described herein, including wash steps to remove non-specific binding. Depending upon the particular binding conditions used, the dissociation constants of the pair can be, for example, less than about 10⁻⁴, 10⁻⁵, 10⁻⁶, 10⁻⁷, 10⁻⁸, 10⁻⁹, 10⁻¹⁰, 10⁻¹¹, or 10⁻¹² M⁻¹.

[0092] Exemplary pairs of binding moieties and receptors that can be used in the invention include, without limitation, antigen and immunoglobulin or active fragments thereof, such as FAbs; immunoglobulin and immunoglobulin (or active fragments, respectively); avidin and biotin, or analogs thereof having specificity for avidin such as imino-biotin; streptavidin and biotin, or analogs thereof having specificity for streptavidin such as imino-biotin; carbohydrates and lectins; and other known proteins and their ligands. It will be understood that either partner in the above-described pairs can be attached to a nucleic acid and detected or isolated based on binding to the respective partner. It will be further understood that several moieties that can be attached to a nucleic acid can function as both primary and secondary labels in a method of the invention. For example, strepatvidin-phycoerythrin can be detected as a primary label due to fluorescence from the phycoerythrin moiety or it can be detected as a secondary label due to its affinity for anti-streptavidin antibodies, as set forth in U.S. Pat. No. 6,203,989.

[0093] In a particular embodiment, the secondary label can be a chemically modifiable moiety. In this embodiment, labels having reactive functional groups can be incorporated into a nucleic acid. The functional group can be subsequently covalently reacted with a primary label. Suitable functional groups include, but are not limited to, amino groups, carboxy groups, maleimide groups, oxo groups and thiol groups.

[0094] Binding moieties can be particularly useful when attached to primers or nucleotide triphosphates used for replication or amplification of a gDNA because the resulting population of genome fragments can be attached to an array via said binding moieties. Furthermore, binding moieties can be useful for separating replicated or amplified genome fragments from other components of an amplification reaction, concentrating the genome fragments, or detecting one or more members of a population of genome fragments when bound to capture probes on an array.

[0095] A binding moiety, detection moiety or any other useful moiety can be attached to a nucleic acid such as an amplified genome fragment using methods known in the art. For example, a primer used to amplify a nucleic acid can include the moiety attached to a base, ribose, phosphate, or analogous structure in a nucleic acid or analog thereof. In particular embodiments, a moiety can be incorporated using modified nucleosides that are added to a growing nucleotide strand, for example, during a replication, amplification or detection step. Nucleosides can be modified, for example, at the base or the ribose, or analogous structures in a nucleic acid analog.

### EXAMPLES

### Example 1

### SNP Selection

[0096] This example describes identification of candidate SNPs in the MHC region for use in creating a haplotype map. This example also describes design of probe nucleic acids useful for detecting SNPs in the MHC region.

[0097] The physical region for the MHC region was determined to be the region of chromosome 6 that is flanked by the genes RFP to MLN. Based on the build33 genome assembly the region spanned from 28,933,330 bp (RFP start) to 33,773,208 bp (MLN end). This region was extended by adding the 10 kb flanking on either side so the region used to find SNPs spanned from 28,923,330 bp to 33,783,208 bp of chromosome 6. The dbSNP database (build 116) was queried for all SNPs in the 28,924,391 bp to 33,389,103 bp region. All SNPs that were classified as two-hit, JSNP, Illumina-verified, or Perlegen-verified were added to the first SNP panel. A second SNP panel was created based on a refined search using the criteria of the first search and further requiring that included SNPs were either in or within 5 kb of coding sequence in genes in the MHC region (defined as 28,923,330 bp to 33,783,208 bp). The SNPs were evaluated using proprietary oligo design software as follows. Candidate SNPs first underwent an informatic screen for suitability for assay design. SNPs were excluded from assay design if they are located near or within palindromic sequences, GT- or AT-rich regions or repeats similar to sequences elsewhere in the genome. SNPs with design score of >0.40 on the best strand and >0.10 on the worst stand were maintained in the second SNP panel. The second SNP panel is listed in Table 1.

[0098] Three nucleic acid probes were designed for each SNP locus that passed screening. There were two 5′ allele-specific oligonucleotides (ASOs), designed to hybridize upstream of the SNP, with the 3′ base of each being allele-specific. The third oligonucleotide is located 3′ of the two ASOs, and is a locus-specific oligonucleotide (LSO). All three oligonucleotide sequences also contain universal PCR primer sites. The LSO contains a unique address sequence that is complementary to a capture sequence on the array. The nucleic acids probes were designed for use in the GoldenGate™ assay, the details of which are known in the art (see, for example, U.S. Pat. No. 6,355,431 B1 and U.S. Ser. No. 10/177,727). The allele-specific and locus-specific portions of the ASOs and LSOs, respectively are listed in Table 2.

### Example 2

### Major Histocompatibility Complex specialty SNP Probe Panel

[0099] This example describes development of a SNP panel in the 5 Mb region of chromosome 6 encompassing the major histocompatibility complex (MHC). A high-density map in this 5 Mb region is developed using both a randomly spaced and an exon-centric SNP approach. These SNPs are genotyped in individuals with known HLA types. Haplotypes derived from the SNP panel loci are tested to demonstrate predictive power for known HLA alleles, particularly rare HLA alleles. The resulting set of SNP probes can allow researchers to determine HLA alleles by elucidating the associated SNP haplotypes.

[0100] An important point is that the classical HLA loci represent a minority of genes found in the MHC region. Therefore, it is likely that disease-causing mutations will actually reside outside one of the classical HLA genes. Therefore, since almost every immunological and inflammatory disorder is studied in this genomic region, the panel of SNP probes will also help discriminate between causal alleles and variation that is in linkage disequilibrium (LD) with causal alleles.

[0101] Nucleic acid probe sets are developed including probes that are complementary to sequences in the 5 Mb region of the MHC region on human chromosome 6. The probes are selected to hybridize to approximately 1 SNP every 1.3 kb. SNP lists for the probe panel are listed in Table 1.

[0102] Several plates are genotyped. These 2 plates include the CEPH hapmap plate (30 trios see Dausset et al. Centre d'etude du polymorphisme humain (CEPH): collaborative genetic mapping of the human genome. Genomics 6:575-577 (1990)), and a second plate with additional pedigree members from the hapmap plate plus other CEPH pedigree members. HLA typing for the samples is done using molecular typing methods. The plates have HLA typing, information about the specific HLA genes (HLA-A, HLA-B, HLA-C, HLA-DRB1, HLA-DMB1, HLA_DQA1, HLA_DQB1, HLA-DPA1, HLA-DPB1), 2 TAP genes (TAP 1, TAP2), and 10 STRs. A third plate consists of samples with known HLA typing HLA-A, -B, -C, DRB1 (SP reference panel and consanguineous reference panel). The remaining plates are derived from disease and population sample collections as outlined in Table 3 below. In order to observe at least 10 copies of each HLA allele with a population frequency >5%, it is estimated that 4000 samples would need to be genotyped. Since the sample collection has not been typed for all HLA genes, it is estimated that 4700-5000 total samples would need to be genotyped in order to detect rare HLA alleles. These samples represent a population based sampling in 3 disease collections (SLE, IDDM, MS) and multiple populations from 3 ethnic groups (Caucasian, African-American, Asian).

| Disease | No. | No. | Total | HLA typing | | | | |
|---|---|---|---|---|---|---|---|---|
| phenotype | trios | case/control | no. indiv. | HLA-A | HLA-B | HLA-C | DRB1 | DQB1 |
| MS | 500 | 500 | 2000 | | | | + | + |
| IDDM | 500 | | 1500 | + | + | + | + | + |
| SLE | 250 | | 750 | | | | + | + |
| Population | | | 1000 | + | + | + | + | + |
| sample | | | | | | | | |
| Total | | | 5250 | | | | | |

[0103] A similar method is performed in which several plates are genotyped. These plates include the CEPH HapMap plate (30 trios see Dausset et al. Centre d'etude du polymorphisme humain (CEPH): collaborative genetic mapping of the human genome. Genomics 6:575-577 (1990)), and a second plate with additional pedigree members from the hapmap plate plus other CEPH pedigree members. HLA typing is known for the samples. A third plate includes the Han Chinese (Beijing)/Japanese (Tokyo) HapMap plate and the fourth plate includes the Yoruba (Ibadan, Nigeria) HapMap plate. HLA types for all plates are done using molecular typing methods. The plates have HLA typing, information about the specific HLA genes (HLA-A, HLA-B, HLA-C, HLA-DRB1, HLA-DMB1, HLA_DQA1, HLA_DQB1, HLA-DPA 1, HLA-DPB 1).

[0104] The contents of the articles, patents, and patent applications, and all other documents and electronically available information mentioned or cited herein, are hereby incorporated by reference in their entirety to the same extent as if each individual publication was specifically and individually indicated to be incorporated by reference. Applicants reserve the right to physically incorporate into this application any and all materials and information from any such articles, patents, patent applications, or other physical and electronic documents.

[0105] The inventions illustratively described herein may suitably be practiced in the absence of any element or elements, limitation or limitations, not specifically disclosed herein. Thus, for example, the terms “comprising”, “including,” “containing”, etc. shall be read expansively and without limitation. Additionally, the terms and expressions employed herein have been used as terms of description and not of limitation, and there is no intention in the use of such terms and expressions of excluding any equivalents of the features shown and described or portions thereof, but it is recognized that various modifications are possible within the scope of the invention claimed. Thus, it should be understood that although the present invention has been specifically disclosed by particular embodiments and optional features, modification and variation of the inventions embodied therein and herein disclosed may be resorted to by those skilled in the art, and that such modifications and variations are considered to be within the scope of this invention.

[0106] The invention has been described broadly and generically herein. Each of the narrower species and subgeneric groupings falling within the generic disclosure also form part of the invention. This includes the generic description of the invention with a proviso or negative limitation removing any subject matter from the genus, regardless of whether or not the excised material is specifically recited herein.

[0107] Other embodiments are within the following claims. In addition, where features or aspects of the invention are described in terms of Markush groups, those skilled in the art will recognize that the invention is also thereby described in terms of any individual member or subgroup of members of the Markush group.

TABLE 1

| | | | Final | Final | Final Score |
|---|---|---|---|---|---|
| | | dbSNP | Best | Score | (best > 0.4, |
| SNP Name | Coordinate | Version | Score | Worst | worst > 0.1) |
| rs2395256 | 32723376 | 111.2 | 0.985 | 0.731 | 0.985 |
| rs1894411 | 32786387 | 100.2 | 0.985 | 0.706 | 0.985 |
| rs2621414 | 32736850 | 100.2 | 0.979 | 0.465 | 0.979 |
| rs1264298 | 30945235 | 110.1 | 0.975 | 0.693 | 0.975 |
| rs1264307 | 30941897 | 106.1 | 0.974 | 0.838 | 0.974 |
| rs241454 | 32566901 | 100.2 | 0.967 | 0.858 | 0.967 |
| rs3134996 | 32631405 | 103.2 | 0.967 | 0.78 | 0.967 |
| rs2294882 | 32138272 | 111.2 | 0.965 | 0.579 | 0.965 |
| rs2001100 | 32154245 | 103.2 | 0.962 | 0.817 | 0.962 |
| rs2273017 | 32108387 | 103.2 | 0.96 | 0.763 | 0.96 |
| rs3817969 | 32387138 | 107.2 | 0.958 | 0.72 | 0.958 |
| rs761189 | 32088616 | 113.2 | 0.956 | 0.828 | 0.956 |
| rs3129736 | 32456710 | 103.2 | 0.956 | 0.718 | 0.956 |
| rs3763350 | 32780534 | 107.2 | 0.955 | 0.608 | 0.955 |
| rs3135374 | 32405081 | 103.2 | 0.954 | 0.773 | 0.954 |
| rs2294880 | 32138479 | 100.2 | 0.95 | 0.776 | 0.95 |
| rs397081 | 32218641 | 87.2 | 0.948 | 0.881 | 0.948 |
| rs3021302 | 32625764 | 101.2 | 0.948 | 0.767 | 0.948 |
| rs3129871 | 32432111 | 103.2 | 0.948 | 0.668 | 0.948 |
| rs365053 | 32222014 | 80.2 | 0.947 | 0.914 | 0.947 |
| rs1264308 | 30650745 | 110.1 | 0.947 | 0.856 | 0.947 |
| rs3806156 | 32144455 | 107.2 | 0.947 | 0.834 | 0.947 |
| rs2253588 | 30960365 | 100.2 | 0.947 | 0.74 | 0.947 |
| rs2074512 | 30940059 | 106.1 | 0.945 | 0.832 | 0.945 |
| rs2076536 | 32365137 | 113.2 | 0.945 | 0.628 | 0.945 |
| rs1988563 | 32524496 | 113.2 | 0.944 | 0.792 | 0.944 |
| rs2253705 | 30960893 | 111.2 | 0.941 | 0.708 | 0.941 |
| rs1894412 | 32505586 | 113.2 | 0.939 | 0.745 | 0.939 |
| rs2071554 | 32778091 | 98.2 | 0.938 | 0.841 | 0.938 |
| rs2395264 | 32506052 | 113.2 | 0.938 | 0.812 | 0.938 |
| rs2071290 | 32164276 | 98.1 | 0.938 | 0.719 | 0.938 |
| rs885912 | 30235364 | 100.1 | 0.937 | 0.616 | 0.937 |
| rs2073717 | 31182949 | 103.2 | 0.935 | 0.809 | 0.935 |
| rs3873444 | 32453481 | 113.2 | 0.933 | 0.78 | 0.933 |
| rs261949 | 30040838 | 108.2 | 0.933 | 0.777 | 0.933 |
| rs2187818 | 32166325 | 113.2 | 0.93 | 0.839 | 0.93 |
| rs2071550 | 32725728 | 111.2 | 0.929 | 0.729 | 0.929 |
| rs1573649 | 32732825 | 98.2 | 0.927 | 0.722 | 0.927 |
| rs2395110 | 31986633 | 113.2 | 0.926 | 0.794 | 0.926 |
| rs2073046 | 32106831 | 98.2 | 0.924 | 0.773 | 0.924 |
| rs2073047 | 32106656 | 98.2 | 0.92 | 0.87 | 0.92 |
| rs743862 | 32401404 | 113.2 | 0.92 | 0.814 | 0.92 |
| rs2074488 | 31299739 | 98.2 | 0.92 | 0.698 | 0.92 |
| rs2072895 | 29462615 | 100.1 | 0.916 | 0.615 | 0.916 |
| rs2076537 | 32088392 | 103.2 | 0.915 | 0.672 | 0.915 |
| rs2072110 | 30130934 | 100.2 | 0.914 | 0.637 | 0.914 |
| rs13501 | 32786937 | 100.2 | 0.914 | 0.609 | 0.914 |
| rs2072896 | 29461898 | 98.2 | 0.912 | 0.651 | 0.912 |
| rs2581 | 32975848 | 110.2 | 0.911 | 0.772 | 0.911 |
| rs2023472 | 30136622 | 113.2 | 0.911 | 0.753 | 0.911 |
| rs2006165 | 32723575 | 111.2 | 0.91 | 0.888 | 0.91 |
| rs2395533 | 32619446 | 111.2 | 0.91 | 0.866 | 0.91 |
| rs2269703 | 30719523 | 100.2 | 0.909 | 0.582 | 0.909 |
| rs259919 | 30086297 | 100.2 | 0.908 | 0.69 | 0.908 |
| rs1265760 | 32092629 | 113.2 | 0.907 | 0.614 | 0.907 |
| rs241428 | 32805590 | 100.2 | 0.903 | 0.891 | 0.903 |
| rs3763316 | 32147503 | 107.2 | 0.9 | 0.867 | 0.9 |
| rs8084 | 32181792 | 108.2 | 0.883 | 0.81 | 0.883 |
| rs1042337 | 32906461 | 103.2 | 0.881 | 0.743 | 0.881 |
| rs2269713 | 30911885 | 100.2 | 0.878 | 0.798 | 0.878 |
| rs2239524 | 31189391 | 103.2 | 0.874 | 0.776 | 0.874 |
| rs3115569 | 31994896 | 103.2 | 0.873 | 0.817 | 0.873 |
| rs241448 | 32567442 | 110.2 | 0.871 | 0.634 | 0.871 |
| rs2071475 | 32553144 | 100.2 | 0.87 | 0.862 | 0.87 |
| rs365066 | 32976704 | 106.2 | 0.87 | 0.738 | 0.87 |
| rs2022059 | 31927246 | 100.1 | 0.865 | 0.796 | 0.865 |
| rs2071474 | 32553339 | 100.2 | 0.863 | 0.685 | 0.863 |
| rs3129745 | 32458086 | 103.1 | 0.859 | 0.854 | 0.859 |
| rs2213572 | 32721372 | 96.1 | 0.852 | 0.72 | 0.852 |
| rs2286656 | 30960370 | 100.2 | 0.849 | 0.846 | 0.849 |
| rs2070121 | 32552311 | 96.2 | 0.846 | 0.736 | 0.846 |
| rs3117098 | 32384271 | 103.2 | 0.844 | 0.811 | 0.844 |
| rs926594 | 32076127 | 113.1 | 0.842 | 0.5 | 0.842 |
| rs2621393 | 32525973 | 100.2 | 0.84 | 0.479 | 0.84 |
| rs7192 | 32431163 | 106.2 | 0.838 | 0.688 | 0.838 |
| rs14004 | 32178466 | 110.2 | 0.838 | 0.646 | 0.838 |
| rs3134943 | 32167507 | 106.1 | 0.832 | 0.728 | 0.832 |
| rs2213585 | 32183907 | 113.2 | 0.83 | 0.771 | 0.83 |
| rs2072894 | 29778275 | 98.2 | 0.83 | 0.55 | 0.83 |
| rs2286655 | 30960734 | 111.2 | 0.822 | 0.743 | 0.822 |
| rs886420 | 30650394 | 110.1 | 0.816 | 0.784 | 0.816 |
| rs2074504 | 30590962 | 110.2 | 0.811 | 0.758 | 0.811 |
| rs2301270 | 32720950 | 100.2 | 0.81 | 0.682 | 0.81 |
| rs3763310 | 32146860 | 107.2 | 0.809 | 0.459 | 0.809 |
| rs241446 | 32567724 | 110.2 | 0.808 | 0.774 | 0.808 |
| rs3129876 | 32178769 | 103.2 | 0.805 | 0.799 | 0.805 |
| rs1043483 | 30954527 | 106.2 | 0.805 | 0.553 | 0.805 |
| rs2286405 | 30033793 | 100.2 | 0.803 | 0.766 | 0.803 |
| rs2284175 | 30645903 | 100.2 | 0.802 | 0.764 | 0.802 |
| rs1362122 | 30937862 | 113.1 | 0.801 | 0.763 | 0.801 |
| rs1265155 | 30914452 | 110.2 | 0.796 | 0.749 | 0.796 |
| rs2267641 | 30926017 | 100.1 | 0.793 | 0.653 | 0.793 |
| rs2647089 | 32452325 | 100.2 | 0.785 | 0.591 | 0.785 |
| rs2240619 | 29746211 | 98.2 | 0.784 | 0.749 | 0.784 |
| rs1061808 | 32156293 | 106.2 | 0.776 | 0.712 | 0.776 |
| rs2249099 | 30140074 | 100.2 | 0.775 | 0.538 | 0.775 |
| rs1264309 | 30936707 | 106.2 | 0.773 | 0.748 | 0.773 |
| rs3763305 | 32140245 | 107.2 | 0.771 | 0.724 | 0.771 |
| rs2073724 | 31190514 | 98.2 | 0.771 | 0.658 | 0.771 |
| rs2582 | 32975998 | 100.2 | 0.765 | 0.727 | 0.765 |
| rs2074484 | 30130552 | 113.2 | 0.765 | 0.589 | 0.765 |
| rs3134945 | 32166238 | 103.1 | 0.737 | 0.6 | 0.737 |
| rs2269418 | 31950877 | 100.2 | 0.734 | 0.711 | 0.734 |
| rs3749968 | 32054719 | 107.2 | 0.73 | 0.461 | 0.73 |
| rs2856705 | 32441713 | 100.2 | 0.72 | 0.697 | 0.72 |
| rs2071283 | 32214936 | 98.2 | 0.719 | 0.718 | 0.719 |
| rs2239518 | 30926890 | 98.1 | 0.712 | 0.468 | 0.712 |
| rs2240804 | 30981694 | 111.1 | 0.711 | 0.641 | 0.711 |
| rs2076525 | 32141373 | 98.1 | 0.704 | 0.606 | 0.704 |
| rs3806157 | 32144558 | 107.2 | 0.693 | 0.47 | 0.693 |
| rs2187823 | 32465266 | 113.2 | 0.436 | 0.385 | 0.436 |
| rs3129858 | 32171277 | 103.2 | 0.969 | 0.71 | 0.969 |
| rs3135396 | 32429995 | 113.2 | 0.953 | 0.896 | 0.953 |
| rs1736917 | 29860267 | 100.2 | 0.929 | 0.727 | 0.929 |
| rs3213485 | 32719506 | 106.2 | 0.928 | 0.907 | 0.928 |
| rs184003 | 32170042 | 96.1 | 0.915 | 0.625 | 0.915 |
| rs2647086 | 32451748 | 100.2 | 0.909 | 0.81 | 0.909 |
| rs2235383 | 29758753 | 98.2 | 0.903 | 0.895 | 0.903 |
| rs3817970 | 32386989 | 107.2 | 0.884 | 0.836 | 0.884 |
| rs2213574 | 32486594 | 96.2 | 0.87 | 0.79 | 0.87 |
| rs2858857 | 32626458 | 100.2 | 0.862 | 0.778 | 0.862 |
| rs2227139 | 32184216 | 113.2 | 0.854 | 0.783 | 0.854 |
| rs709052 | 31381985 | 113.2 | 0.842 | 0.811 | 0.842 |
| rs2239519 | 30859614 | 103.2 | 0.841 | 0.816 | 0.841 |
| rs3844313 | 32636608 | 111.2 | 0.838 | 0.5 | 0.838 |
| rs2076534 | 32388166 | 103.2 | 0.828 | 0.722 | 0.828 |
| rs2074490 | 31299245 | 98.2 | 0.828 | 0.625 | 0.828 |
| rs1049033 | 29568397 | 106.2 | 0.826 | 0.758 | 0.826 |
| rs206019 | 31950998 | 87.2 | 0.818 | 0.816 | 0.818 |
| rs1265157 | 30913023 | 100.2 | 0.813 | 0.464 | 0.813 |
| rs1044043 | 32787395 | 108.2 | 0.793 | 0.787 | 0.793 |
| rs1615839 | 29830956 | 113.2 | 0.784 | 0.755 | 0.784 |
| rs2071555 | 32906566 | 98.2 | 0.779 | 0.729 | 0.779 |
| rs241441 | 32568054 | 110.2 | 0.763 | 0.689 | 0.763 |
| rs1624278 | 29861283 | 111.2 | 0.701 | 0.538 | 0.701 |
| rs2395195 | 32218746 | 114.2 | 0.44 | 0.318 | 0.44 |
| rs915667 | 29863096 | 110.2 | 0.425 | 0.327 | 0.425 |
| rs1964995 | 32468893 | 113.2 | 0.411 | 0.305 | 0.411 |
| rs3117226 | 33059106 | 103.2 | 0.997 | 0.664 | 0.997 |
| rs2858333 | 32451842 | 100.2 | 0.995 | 0.714 | 0.995 |
| rs3025644 | 29338681 | 102.2 | 0.994 | 0.647 | 0.994 |
| rs3129939 | 32107523 | 113.2 | 0.993 | 0.706 | 0.993 |
| rs2534655 | 31531601 | 100.2 | 0.993 | 0.603 | 0.993 |
| rs2144425 | 29407525 | 96.2 | 0.992 | 0.795 | 0.992 |
| rs2523969 | 29709535 | 100.2 | 0.99 | 0.684 | 0.99 |
| rs2746149 | 29206110 | 100.2 | 0.99 | 0.645 | 0.99 |
| rs1265048 | 31142215 | 87.2 | 0.99 | 0.535 | 0.99 |
| rs2535276 | 31145178 | 100.2 | 0.99 | 0.535 | 0.99 |
| rs3129267 | 33091567 | 103.2 | 0.989 | 0.688 | 0.989 |
| rs3095314 | 30860389 | 113.2 | 0.986 | 0.745 | 0.986 |
| rs2844720 | 30246475 | 100.1 | 0.986 | 0.738 | 0.986 |
| rs2294476 | 33091746 | 100.2 | 0.985 | 0.869 | 0.985 |
| rs2394517 | 29137239 | 113.2 | 0.985 | 0.658 | 0.985 |
| rs916571 | 29972713 | 103.2 | 0.984 | 0.685 | 0.984 |
| rs3129941 | 32108443 | 103.2 | 0.984 | 0.622 | 0.984 |
| rs3817659 | 31375600 | 107.2 | 0.983 | 0.847 | 0.983 |
| rs2596449 | 31497109 | 100.2 | 0.983 | 0.8 | 0.983 |
| rs176250 | 32937553 | 106.2 | 0.983 | 0.763 | 0.983 |
| rs6457116 | 29998423 | 116.1 | 0.983 | 0.76 | 0.983 |
| rs2524070 | 31303823 | 100.2 | 0.982 | 0.772 | 0.982 |
| rs2857178 | 32523545 | 100.2 | 0.982 | 0.748 | 0.982 |
| rs3218822 | 30651094 | 106.1 | 0.982 | 0.741 | 0.982 |
| rs3817981 | 32386695 | 107.2 | 0.981 | 0.584 | 0.981 |
| rs1610735 | 29783756 | 110.2 | 0.98 | 0.801 | 0.98 |
| rs2394737 | 29913757 | 100.2 | 0.979 | 0.659 | 0.979 |
| rs2239530 | 29922873 | 98.2 | 0.978 | 0.815 | 0.978 |
| rs4415152 | 32718594 | 111.2 | 0.978 | 0.767 | 0.978 |
| rs4434496 | 32449977 | 111.2 | 0.978 | 0.733 | 0.978 |
| rs3130602 | 32973654 | 103.2 | 0.977 | 0.864 | 0.977 |
| rs211456 | 33390833 | 100.2 | 0.977 | 0.794 | 0.977 |
| rs3091282 | 33058645 | 103.2 | 0.977 | 0.784 | 0.977 |
| rs4959036 | 29706893 | 111.2 | 0.975 | 0.637 | 0.975 |
| rs2524103 | 31293908 | 111.2 | 0.974 | 0.815 | 0.974 |
| rs45855 | 31960238 | 100.2 | 0.974 | 0.688 | 0.974 |
| rs3130404 | 30003008 | 103.2 | 0.974 | 0.682 | 0.974 |
| rs211453 | 33331582 | 111.2 | 0.974 | 0.675 | 0.974 |
| rs3135375 | 32405049 | 103.2 | 0.973 | 0.482 | 0.973 |
| rs3129767 | 32365732 | 103.2 | 0.972 | 0.824 | 0.972 |
| rs7744593 | 32705896 | 116.1 | 0.972 | 0.824 | 0.972 |
| rs2734979 | 29593919 | 100.1 | 0.972 | 0.763 | 0.972 |
| rs3094149 | 29908738 | 103.2 | 0.971 | 0.823 | 0.971 |
| rs2517723 | 29686026 | 100.2 | 0.971 | 0.639 | 0.971 |
| rs1632995 | 29834587 | 89.2 | 0.971 | 0.604 | 0.971 |
| rs4248143 | 29706649 | 111.2 | 0.97 | 0.769 | 0.97 |
| rs8807 | 33034298 | 116.2 | 0.97 | 0.714 | 0.97 |
| rs3130745 | 29211171 | 103.2 | 0.97 | 0.649 | 0.97 |
| rs2858331 | 32452034 | 100.2 | 0.969 | 0.733 | 0.969 |
| rs2596503 | 31379562 | 100.2 | 0.968 | 0.828 | 0.968 |
| rs2517529 | 31140748 | 100.2 | 0.968 | 0.822 | 0.968 |
| rs761188 | 32088730 | 113.2 | 0.967 | 0.876 | 0.967 |
| rs2295664 | 31691850 | 100.2 | 0.967 | 0.795 | 0.967 |
| rs2523504 | 31569582 | 100.2 | 0.967 | 0.748 | 0.967 |
| rs7381625 | 32735736 | 116.1 | 0.966 | 0.906 | 0.966 |
| rs407161 | 29581677 | 100.2 | 0.966 | 0.761 | 0.966 |
| rs3900268 | 29584138 | 108.2 | 0.966 | 0.753 | 0.966 |
| rs3117123 | 32087146 | 111.2 | 0.966 | 0.699 | 0.966 |
| rs211455 | 33329969 | 111.2 | 0.966 | 0.69 | 0.966 |
| rs7451341 | 29496370 | 116.1 | 0.966 | 0.639 | 0.966 |
| rs3095312 | 31151640 | 110.2 | 0.966 | 0.6 | 0.966 |
| rs6932266 | 32486900 | 116.1 | 0.965 | 0.864 | 0.965 |
| rs2295120 | 33062216 | 100.2 | 0.965 | 0.797 | 0.965 |
| rs458679 | 33243940 | 108.2 | 0.965 | 0.792 | 0.965 |
| rs763028 | 32723050 | 111.2 | 0.965 | 0.702 | 0.965 |
| rs1360 | 32621541 | 106.2 | 0.965 | 0.634 | 0.965 |
| rs2734574 | 31552616 | 100.2 | 0.965 | 0.62 | 0.965 |
| rs1548515 | 30448119 | 113.2 | 0.965 | 0.501 | 0.965 |
| rs1610736 | 29783781 | 110.2 | 0.964 | 0.766 | 0.964 |
| rs1573648 | 32733006 | 98.2 | 0.964 | 0.665 | 0.964 |
| rs3807035 | 30105616 | 107.2 | 0.964 | 0.636 | 0.964 |
| rs3763354 | 32780332 | 107.2 | 0.964 | 0.615 | 0.964 |
| rs2855437 | 33131677 | 100.1 | 0.964 | 0.548 | 0.964 |
| rs3117008 | 33088947 | 103.2 | 0.963 | 0.753 | 0.963 |
| rs3823342 | 29683825 | 107.2 | 0.962 | 0.887 | 0.962 |
| rs2254618 | 31486078 | 111.2 | 0.962 | 0.834 | 0.962 |
| rs1541270 | 30164530 | 113.2 | 0.962 | 0.805 | 0.962 |
| rs3817962 | 32139071 | 107.2 | 0.962 | 0.792 | 0.962 |
| rs3763313 | 32147228 | 107.2 | 0.962 | 0.647 | 0.962 |
| rs1611651 | 29909636 | 110.2 | 0.961 | 0.849 | 0.961 |
| rs2516713 | 29998004 | 100.2 | 0.961 | 0.829 | 0.961 |
| rs3869070 | 30085039 | 108.2 | 0.961 | 0.785 | 0.961 |
| rs7743412 | 32626494 | 116.1 | 0.961 | 0.692 | 0.961 |
| rs1541267 | 30164770 | 113.2 | 0.96 | 0.737 | 0.96 |
| rs2853977 | 31150062 | 110.2 | 0.96 | 0.73 | 0.96 |
| rs3891156 | 29759498 | 113.2 | 0.959 | 0.797 | 0.959 |
| rs2394607 | 29140274 | 100.2 | 0.959 | 0.769 | 0.959 |
| rs1028411 | 29138154 | 111.2 | 0.959 | 0.735 | 0.959 |
| rs2022065 | 30182232 | 103.2 | 0.958 | 0.921 | 0.958 |
| rs2294748 | 29563620 | 100.2 | 0.958 | 0.756 | 0.958 |
| rs6933541 | 32363760 | 116.1 | 0.958 | 0.668 | 0.958 |
| rs1419638 | 29423517 | 113.2 | 0.958 | 0.551 | 0.958 |
| rs13395 | 29684102 | 101.2 | 0.957 | 0.849 | 0.957 |
| rs64036 | 29298025 | 110.2 | 0.956 | 0.772 | 0.956 |
| rs727939 | 32619634 | 108.2 | 0.956 | 0.731 | 0.956 |
| rs10751 | 32904063 | 103.2 | 0.956 | 0.717 | 0.956 |
| rs3869065 | 29758232 | 113.2 | 0.956 | 0.667 | 0.956 |
| rs3094061 | 30091947 | 103.2 | 0.955 | 0.848 | 0.955 |
| rs419434 | 32980132 | 80.2 | 0.955 | 0.755 | 0.955 |
| rs429916 | 32971969 | 80.2 | 0.955 | 0.706 | 0.955 |
| rs3130603 | 32982055 | 113.2 | 0.955 | 0.684 | 0.955 |
| rs397144 | 29948685 | 80.2 | 0.955 | 0.613 | 0.955 |
| rs3873332 | 30956789 | 113.2 | 0.955 | 0.499 | 0.955 |
| rs2735052 | 29472322 | 111.2 | 0.954 | 0.95 | 0.954 |
| rs3134759 | 30985111 | 103.2 | 0.954 | 0.792 | 0.954 |
| rs2571430 | 30010216 | 100.2 | 0.954 | 0.772 | 0.954 |
| rs4713367 | 30527580 | 111.2 | 0.954 | 0.756 | 0.954 |
| rs2523774 | 29580336 | 100.2 | 0.954 | 0.737 | 0.954 |
| rs2233969 | 31141238 | 100.2 | 0.954 | 0.633 | 0.954 |
| rs522162 | 31690675 | 113.2 | 0.954 | 0.55 | 0.954 |
| rs3763324 | 32432687 | 107.2 | 0.953 | 0.875 | 0.953 |
| rs1033568 | 29028722 | 113.2 | 0.953 | 0.85 | 0.953 |
| rs1632984 | 29835963 | 111.2 | 0.953 | 0.814 | 0.953 |
| rs1362060 | 29142170 | 113.2 | 0.953 | 0.807 | 0.953 |
| rs7754443 | 31313555 | 116.1 | 0.953 | 0.776 | 0.953 |
| rs2395351 | 33101874 | 100.2 | 0.953 | 0.633 | 0.953 |
| rs2267644 | 32218584 | 100.1 | 0.953 | 0.61 | 0.953 |
| rs29232 | 29382189 | 102.2 | 0.953 | 0.526 | 0.953 |
| rs1633085 | 29486755 | 113.2 | 0.952 | 0.863 | 0.952 |
| rs7743506 | 32626391 | 116.1 | 0.952 | 0.84 | 0.952 |
| rs1737009 | 29820484 | 89.2 | 0.952 | 0.819 | 0.952 |
| rs2844606 | 31307723 | 100.2 | 0.952 | 0.734 | 0.952 |
| rs2394173 | 29835729 | 111.2 | 0.952 | 0.675 | 0.952 |
| rs4392759 | 30179479 | 113.2 | 0.951 | 0.938 | 0.951 |
| rs3132528 | 31192375 | 103.2 | 0.951 | 0.857 | 0.951 |
| rs3130782 | 30685601 | 103.2 | 0.951 | 0.848 | 0.951 |
| rs379221 | 30010522 | 100.2 | 0.951 | 0.827 | 0.951 |
| rs7195 | 32432022 | 108.2 | 0.951 | 0.795 | 0.951 |
| rs7383433 | 32780065 | 116.1 | 0.951 | 0.696 | 0.951 |
| rs1632854 | 30746407 | 89.2 | 0.951 | 0.677 | 0.951 |
| rs5007259 | 32398570 | 113.2 | 0.95 | 0.834 | 0.95 |
| rs3130377 | 30094151 | 103.1 | 0.95 | 0.759 | 0.95 |
| rs1419632 | 29144004 | 113.2 | 0.95 | 0.716 | 0.95 |
| rs3819721 | 32798211 | 107.2 | 0.95 | 0.55 | 0.95 |
| rs2071363 | 33034582 | 98.2 | 0.949 | 0.87 | 0.949 |
| rs2233966 | 31141665 | 113.2 | 0.949 | 0.854 | 0.949 |
| rs2621416 | 32736659 | 100.2 | 0.949 | 0.821 | 0.949 |
| rs1736912 | 29860522 | 98.2 | 0.949 | 0.793 | 0.949 |
| rs3763347 | 32816388 | 111.2 | 0.949 | 0.768 | 0.949 |
| rs1610613 | 29776202 | 111.2 | 0.949 | 0.557 | 0.949 |
| rs3135373 | 32405129 | 103.2 | 0.948 | 0.904 | 0.948 |
| rs2523946 | 30002326 | 100.2 | 0.948 | 0.889 | 0.948 |
| rs3873374 | 31310603 | 113.2 | 0.948 | 0.826 | 0.948 |
| rs17034 | 32567278 | 110.2 | 0.948 | 0.818 | 0.948 |
| rs2073149 | 29427860 | 98.2 | 0.948 | 0.754 | 0.948 |
| rs2073150 | 29427678 | 98.2 | 0.948 | 0.646 | 0.948 |
| rs3117007 | 33089187 | 103.2 | 0.947 | 0.8 | 0.947 |
| rs3094207 | 31152212 | 110.2 | 0.947 | 0.731 | 0.947 |
| rs3748082 | 33284574 | 107.2 | 0.946 | 0.834 | 0.946 |
| rs423808 | 30009503 | 100.2 | 0.946 | 0.814 | 0.946 |
| rs445150 | 29709403 | 100.2 | 0.946 | 0.748 | 0.946 |
| rs3734841 | 30030063 | 107.2 | 0.945 | 0.918 | 0.945 |
| rs3132523 | 31200664 | 103.2 | 0.945 | 0.894 | 0.945 |
| rs3997854 | 32453672 | 108.2 | 0.945 | 0.762 | 0.945 |
| rs2071482 | 32810113 | 111.1 | 0.945 | 0.727 | 0.945 |
| rs2071469 | 32778198 | 100.2 | 0.945 | 0.702 | 0.945 |
| rs2736155 | 31375957 | 113.2 | 0.945 | 0.654 | 0.945 |
| rs2524198 | 30192260 | 100.2 | 0.945 | 0.582 | 0.945 |
| rs560505 | 32032528 | 83.2 | 0.944 | 0.817 | 0.944 |
| rs2894252 | 32364952 | 113.2 | 0.944 | 0.758 | 0.944 |
| rs3094220 | 31143793 | 103.2 | 0.944 | 0.745 | 0.944 |
| rs3763355 | 32780297 | 107.2 | 0.943 | 0.888 | 0.943 |
| rs3823312 | 29707755 | 107.2 | 0.943 | 0.83 | 0.943 |
| rs4999342 | 32467580 | 113.2 | 0.943 | 0.764 | 0.943 |
| rs2517403 | 30837767 | 100.2 | 0.943 | 0.742 | 0.943 |
| rs4987086 | 31313315 | 113.2 | 0.943 | 0.641 | 0.943 |
| rs3819294 | 31384241 | 107.2 | 0.943 | 0.623 | 0.943 |
| rs909728 | 29490319 | 110.2 | 0.942 | 0.903 | 0.942 |
| rs2294477 | 33100435 | 103.2 | 0.942 | 0.8 | 0.942 |
| rs3117229 | 33057516 | 103.2 | 0.942 | 0.708 | 0.942 |
| rs3909178 | 31145020 | 113.2 | 0.942 | 0.692 | 0.942 |
| rs3116985 | 33102037 | 103.2 | 0.942 | 0.573 | 0.942 |
| rs3095320 | 31151704 | 103.2 | 0.941 | 0.795 | 0.941 |
| rs241445 | 32567829 | 110.2 | 0.941 | 0.752 | 0.941 |
| rs3828896 | 31234249 | 107.2 | 0.94 | 0.913 | 0.94 |
| rs6914995 | 33042191 | 116.1 | 0.94 | 0.841 | 0.94 |
| rs3815086 | 30174546 | 107.2 | 0.94 | 0.677 | 0.94 |
| rs3132708 | 29910075 | 103.2 | 0.939 | 0.82 | 0.939 |
| rs6457644 | 32707694 | 116.1 | 0.939 | 0.744 | 0.939 |
| rs6914849 | 33042162 | 116.1 | 0.938 | 0.805 | 0.938 |
| rs4151655 | 31687743 | 110.1 | 0.938 | 0.804 | 0.938 |
| rs6457327 | 31134836 | 116.1 | 0.938 | 0.698 | 0.938 |
| rs2647087 | 32451806 | 100.2 | 0.938 | 0.626 | 0.938 |
| rs3830060 | 32404728 | 107.2 | 0.937 | 0.876 | 0.937 |
| rs915653 | 31427805 | 113.2 | 0.937 | 0.747 | 0.937 |
| rs2524059 | 31310115 | 100.2 | 0.937 | 0.686 | 0.937 |
| rs6912673 | 29566597 | 116.1 | 0.937 | 0.647 | 0.937 |
| rs4713218 | 29428411 | 111.2 | 0.936 | 0.901 | 0.936 |
| rs3135372 | 32405258 | 103.2 | 0.936 | 0.898 | 0.936 |
| rs3807034 | 30105157 | 107.2 | 0.936 | 0.788 | 0.936 |
| rs2158285 | 30101785 | 100.2 | 0.936 | 0.77 | 0.936 |
| rs2735061 | 29756449 | 110.2 | 0.936 | 0.746 | 0.936 |
| rs204995 | 31925042 | 113.1 | 0.936 | 0.674 | 0.936 |
| rs2596501 | 31379963 | 100.2 | 0.935 | 0.915 | 0.935 |
| rs2256902 | 29711130 | 110.2 | 0.935 | 0.878 | 0.935 |
| rs2844586 | 31376773 | 113.2 | 0.935 | 0.797 | 0.935 |
| rs2293861 | 31769783 | 100.2 | 0.935 | 0.764 | 0.935 |
| rs1233408 | 29579546 | 87.2 | 0.935 | 0.687 | 0.935 |
| rs7382794 | 32735599 | 116.1 | 0.934 | 0.806 | 0.934 |
| rs3830061 | 32622186 | 107.2 | 0.934 | 0.778 | 0.934 |
| rs2524074 | 31303324 | 100.2 | 0.934 | 0.703 | 0.934 |
| rs3131025 | 29461240 | 111.2 | 0.934 | 0.675 | 0.934 |
| rs1034324 | 30139370 | 113.2 | 0.933 | 0.76 | 0.933 |
| rs3130655 | 30594468 | 113.1 | 0.933 | 0.585 | 0.933 |
| rs4713324 | 30440987 | 111.2 | 0.932 | 0.82 | 0.932 |
| rs3129888 | 32431243 | 103.2 | 0.932 | 0.799 | 0.932 |
| rs2071366 | 33034074 | 98.2 | 0.931 | 0.918 | 0.931 |
| rs2074479 | 30101798 | 98.2 | 0.931 | 0.868 | 0.931 |
| rs2516312 | 31310193 | 111.2 | 0.931 | 0.856 | 0.931 |
| rs1737078 | 29495697 | 111.2 | 0.931 | 0.748 | 0.931 |
| rs3734854 | 31139642 | 107.2 | 0.931 | 0.735 | 0.931 |
| rs6901541 | 32468022 | 116.1 | 0.931 | 0.735 | 0.931 |
| rs3916766 | 32452402 | 108.2 | 0.931 | 0.636 | 0.931 |
| rs6919972 | 33035624 | 116.1 | 0.93 | 0.859 | 0.93 |
| rs6911639 | 32979625 | 116.1 | 0.93 | 0.831 | 0.93 |
| rs6921314 | 29974620 | 116.1 | 0.93 | 0.622 | 0.93 |
| rs3135351 | 32163702 | 113.2 | 0.929 | 0.885 | 0.929 |
| rs3129299 | 32902268 | 110.2 | 0.929 | 0.854 | 0.929 |
| rs7745235 | 29975730 | 116.1 | 0.929 | 0.808 | 0.929 |
| rs3819285 | 31384496 | 107.2 | 0.929 | 0.467 | 0.929 |
| rs1233493 | 29520669 | 113.2 | 0.928 | 0.808 | 0.928 |
| rs2066744 | 32719090 | 94.2 | 0.928 | 0.763 | 0.928 |
| rs1367728 | 33036262 | 111.2 | 0.927 | 0.808 | 0.927 |
| rs2853960 | 31294818 | 100.2 | 0.927 | 0.808 | 0.927 |
| rs4151672 | 31690588 | 110.1 | 0.927 | 0.794 | 0.927 |
| rs3891157 | 29759197 | 113.2 | 0.927 | 0.765 | 0.927 |
| rs2394255 | 30010203 | 113.2 | 0.927 | 0.517 | 0.927 |
| rs3128967 | 33057544 | 103.2 | 0.926 | 0.903 | 0.926 |
| rs3130106 | 30132651 | 103.2 | 0.926 | 0.895 | 0.926 |
| rs1059231 | 33280972 | 106.2 | 0.926 | 0.884 | 0.926 |
| rs356966 | 30033385 | 100.2 | 0.926 | 0.873 | 0.926 |
| rs2394605 | 29140075 | 100.2 | 0.926 | 0.813 | 0.926 |
| rs2295118 | 33062339 | 116.2 | 0.926 | 0.767 | 0.926 |
| rs2050191 | 32364691 | 113.2 | 0.926 | 0.752 | 0.926 |
| rs427417 | 32916022 | 113.2 | 0.926 | 0.744 | 0.926 |
| rs3828808 | 32630674 | 107.2 | 0.926 | 0.685 | 0.926 |
| rs7383005 | 33092283 | 116.1 | 0.925 | 0.884 | 0.925 |
| rs6940585 | 31143210 | 116.1 | 0.925 | 0.709 | 0.925 |
| rs2294745 | 29292910 | 100.2 | 0.925 | 0.607 | 0.925 |
| rs3128854 | 29202453 | 103.2 | 0.924 | 0.876 | 0.924 |
| rs1633037 | 29513367 | 89.2 | 0.924 | 0.794 | 0.924 |
| rs3132550 | 31149814 | 110.2 | 0.924 | 0.773 | 0.924 |
| rs1610708 | 29833403 | 100.2 | 0.924 | 0.596 | 0.924 |
| rs2844766 | 30001419 | 100.2 | 0.923 | 0.756 | 0.923 |
| rs4713447 | 30933721 | 111.2 | 0.923 | 0.74 | 0.923 |
| rs4151671 | 31977724 | 110.1 | 0.923 | 0.71 | 0.923 |
| rs733840 | 29489040 | 111.2 | 0.923 | 0.591 | 0.923 |
| rs3198005 | 32806627 | 105.2 | 0.922 | 0.874 | 0.922 |
| rs2523814 | 29907528 | 100.2 | 0.922 | 0.759 | 0.922 |
| rs7755580 | 32708007 | 116.1 | 0.922 | 0.726 | 0.922 |
| rs2071364 | 33034348 | 98.2 | 0.922 | 0.661 | 0.922 |
| rs2894239 | 31986553 | 113.2 | 0.921 | 0.853 | 0.921 |
| rs3117230 | 33068623 | 103.2 | 0.921 | 0.825 | 0.921 |
| rs1628578 | 29466260 | 89.2 | 0.921 | 0.8 | 0.921 |
| rs362531 | 29592911 | 102.2 | 0.921 | 0.491 | 0.921 |
| rs6899851 | 33035560 | 116.1 | 0.92 | 0.817 | 0.92 |
| rs4084091 | 31162227 | 113.2 | 0.92 | 0.792 | 0.92 |
| rs2735097 | 29686059 | 100.2 | 0.92 | 0.777 | 0.92 |
| rs1264698 | 30127934 | 87.2 | 0.92 | 0.754 | 0.92 |
| rs2071789 | 28974628 | 98.2 | 0.92 | 0.712 | 0.92 |
| rs3093544 | 31312537 | 103.2 | 0.92 | 0.688 | 0.92 |
| rs3132130 | 30088246 | 103.2 | 0.92 | 0.659 | 0.92 |
| rs3093669 | 31605443 | 111.2 | 0.92 | 0.42 | 0.92 |
| rs2092305 | 33101636 | 113.2 | 0.919 | 0.909 | 0.919 |
| rs3128927 | 33067276 | 116.2 | 0.919 | 0.882 | 0.919 |
| rs1633009 | 29828244 | 89.2 | 0.919 | 0.878 | 0.919 |
| rs6914878 | 29825606 | 116.1 | 0.919 | 0.878 | 0.919 |
| rs8337 | 29294434 | 106.2 | 0.919 | 0.84 | 0.919 |
| rs2286712 | 31555706 | 100.2 | 0.919 | 0.674 | 0.919 |
| rs1633086 | 29781002 | 113.2 | 0.919 | 0.634 | 0.919 |
| rs2245514 | 30203213 | 100.1 | 0.919 | 0.421 | 0.919 |
| rs1265086 | 31170702 | 100.2 | 0.918 | 0.77 | 0.918 |
| rs466384 | 33247364 | 106.1 | 0.917 | 0.916 | 0.917 |
| rs3117225 | 33059158 | 103.2 | 0.917 | 0.746 | 0.917 |
| rs209473 | 32916322 | 110.2 | 0.917 | 0.642 | 0.917 |
| rs4151664 | 31691631 | 110.1 | 0.917 | 0.58 | 0.917 |
| rs909967 | 29567394 | 100.2 | 0.916 | 0.915 | 0.916 |
| rs1633013 | 29820514 | 89.2 | 0.916 | 0.897 | 0.916 |
| rs4151657 | 31688298 | 110.1 | 0.916 | 0.849 | 0.916 |
| rs1419689 | 30141346 | 88.2 | 0.916 | 0.746 | 0.916 |
| rs3757333 | 30089400 | 107.2 | 0.916 | 0.385 | 0.916 |
| rs1264541 | 30448054 | 113.1 | 0.915 | 0.789 | 0.915 |
| rs7992 | 31688925 | 106.2 | 0.915 | 0.767 | 0.915 |
| rs2523926 | 30748573 | 111.1 | 0.915 | 0.725 | 0.915 |
| rs3823419 | 31161827 | 107.2 | 0.915 | 0.498 | 0.915 |
| rs2735003 | 29579392 | 100.2 | 0.914 | 0.864 | 0.914 |
| rs3817965 | 32138684 | 111.2 | 0.914 | 0.803 | 0.914 |
| rs2076540 | 32088033 | 111.1 | 0.914 | 0.668 | 0.914 |
| rs3998799 | 29753205 | 108.1 | 0.914 | 0.666 | 0.914 |
| rs2428510 | 29593785 | 100.1 | 0.913 | 0.853 | 0.913 |
| rs3094187 | 31187786 | 103.2 | 0.913 | 0.839 | 0.913 |
| rs2076484 | 29294761 | 98.2 | 0.913 | 0.781 | 0.913 |
| rs3763349 | 32801645 | 107.2 | 0.913 | 0.776 | 0.913 |
| rs2523512 | 31565528 | 100.1 | 0.913 | 0.466 | 0.913 |
| rs2517439 | 30713687 | 100.2 | 0.912 | 0.818 | 0.912 |
| rs1419634 | 29140427 | 113.2 | 0.912 | 0.805 | 0.912 |
| rs241438 | 32568377 | 110.2 | 0.912 | 0.804 | 0.912 |
| rs2244839 | 31497087 | 111.2 | 0.912 | 0.676 | 0.912 |
| rs3135033 | 32951899 | 103.2 | 0.912 | 0.547 | 0.912 |
| rs3135388 | 32183808 | 111.2 | 0.911 | 0.906 | 0.911 |
| rs3807033 | 30104744 | 107.2 | 0.911 | 0.805 | 0.911 |
| rs4713446 | 30933597 | 111.2 | 0.91 | 0.905 | 0.91 |
| rs3115608 | 29915513 | 110.2 | 0.91 | 0.839 | 0.91 |
| rs1736994 | 29829167 | 92.2 | 0.91 | 0.736 | 0.91 |
| rs6913309 | 32365629 | 116.1 | 0.91 | 0.722 | 0.91 |
| rs6905408 | 29696267 | 116.1 | 0.91 | 0.675 | 0.91 |
| rs3128917 | 33061443 | 103.2 | 0.909 | 0.829 | 0.909 |
| rs6934041 | 32724333 | 116.1 | 0.909 | 0.772 | 0.909 |
| rs6916248 | 33090117 | 116.1 | 0.908 | 0.879 | 0.908 |
| rs5007263 | 32398451 | 113.2 | 0.908 | 0.796 | 0.908 |
| rs3819300 | 31381055 | 113.2 | 0.908 | 0.741 | 0.908 |
| rs2071471 | 32778060 | 98.2 | 0.908 | 0.681 | 0.908 |
| rs2894179 | 30837429 | 101.2 | 0.907 | 0.856 | 0.907 |
| rs2239705 | 31572126 | 100.2 | 0.907 | 0.708 | 0.907 |
| rs2301220 | 33031831 | 100.2 | 0.907 | 0.686 | 0.907 |
| rs2272904 | 33129032 | 100.2 | 0.907 | 0.601 | 0.907 |
| rs6935418 | 29566695 | 116.1 | 0.906 | 0.889 | 0.906 |
| rs5021450 | 32709454 | 116.2 | 0.906 | 0.841 | 0.906 |
| rs2857103 | 32792819 | 110.1 | 0.906 | 0.838 | 0.906 |
| rs2853953 | 31294813 | 113.2 | 0.906 | 0.833 | 0.906 |
| rs757259 | 30176314 | 113.2 | 0.906 | 0.785 | 0.906 |
| rs3135391 | 32181744 | 103.2 | 0.906 | 0.749 | 0.906 |
| rs2523606 | 31381640 | 110.2 | 0.906 | 0.475 | 0.906 |
| rs1632962 | 29454566 | 89.2 | 0.905 | 0.866 | 0.905 |
| rs3135353 | 32163634 | 113.2 | 0.905 | 0.821 | 0.905 |
| rs3130235 | 33090053 | 103.2 | 0.905 | 0.799 | 0.905 |
| rs2394606 | 29140107 | 100.2 | 0.904 | 0.903 | 0.904 |
| rs2734997 | 29580403 | 100.2 | 0.904 | 0.838 | 0.904 |
| rs3998794 | 29473437 | 108.2 | 0.904 | 0.836 | 0.904 |
| rs2844463 | 31385925 | 100.2 | 0.904 | 0.82 | 0.904 |
| rs7452233 | 31237155 | 116.1 | 0.904 | 0.805 | 0.904 |
| rs6910598 | 29907379 | 116.1 | 0.904 | 0.771 | 0.904 |
| rs3129008 | 29908952 | 103.2 | 0.904 | 0.656 | 0.904 |
| rs1150741 | 30090822 | 110.2 | 0.904 | 0.647 | 0.904 |
| rs7774452 | 32725437 | 116.1 | 0.904 | 0.618 | 0.904 |
| rs6911724 | 30085973 | 116.1 | 0.903 | 0.887 | 0.903 |
| rs2294479 | 33091060 | 116.2 | 0.903 | 0.884 | 0.903 |
| rs417374 | 29289230 | 100.2 | 0.903 | 0.808 | 0.903 |
| rs1633030 | 29516552 | 89.2 | 0.903 | 0.796 | 0.903 |
| rs2024679 | 29289670 | 113.2 | 0.903 | 0.793 | 0.903 |
| rs3116999 | 33098613 | 103.2 | 0.903 | 0.779 | 0.903 |
| rs3765605 | 29746752 | 107.2 | 0.903 | 0.766 | 0.903 |
| rs2844603 | 31310146 | 100.2 | 0.903 | 0.682 | 0.903 |
| rs2621419 | 32735797 | 100.2 | 0.903 | 0.618 | 0.903 |
| rs1362073 | 29451165 | 111.2 | 0.903 | 0.39 | 0.903 |
| rs2072634 | 31688049 | 110.1 | 0.902 | 0.884 | 0.902 |
| rs213208 | 33170725 | 96.2 | 0.902 | 0.825 | 0.902 |
| rs3956934 | 29819357 | 108.2 | 0.902 | 0.786 | 0.902 |
| rs3117227 | 33058213 | 103.2 | 0.902 | 0.772 | 0.902 |
| rs4713215 | 29426558 | 111.2 | 0.902 | 0.746 | 0.902 |
| rs1632942 | 29567398 | 100.2 | 0.902 | 0.735 | 0.902 |
| rs3129886 | 32430093 | 103.2 | 0.901 | 0.897 | 0.901 |
| rs2071798 | 32485349 | 98.2 | 0.901 | 0.877 | 0.901 |
| rs2523586 | 31386184 | 100.2 | 0.901 | 0.85 | 0.901 |
| rs3117234 | 33066972 | 103.2 | 0.901 | 0.846 | 0.901 |
| rs2071473 | 32553362 | 100.2 | 0.901 | 0.527 | 0.901 |
| rs3094041 | 30132238 | 103.2 | 0.901 | 0.512 | 0.901 |
| rs2596472 | 31199725 | 100.2 | 0.9 | 0.87 | 0.9 |
| rs2213570 | 32723076 | 96.2 | 0.9 | 0.822 | 0.9 |
| rs1736922 | 29756480 | 110.2 | 0.9 | 0.812 | 0.9 |
| rs3129269 | 33099061 | 103.2 | 0.9 | 0.791 | 0.9 |
| rs6920457 | 33035846 | 116.1 | 0.899 | 0.893 | 0.899 |
| rs4711229 | 30527502 | 111.2 | 0.899 | 0.879 | 0.899 |
| rs1799964 | 31313066 | 111.2 | 0.899 | 0.836 | 0.899 |
| rs4959037 | 29707065 | 111.2 | 0.899 | 0.762 | 0.899 |
| rs1611652 | 29909922 | 100.2 | 0.899 | 0.748 | 0.899 |
| rs2071354 | 33037453 | 98.2 | 0.899 | 0.726 | 0.899 |
| rs1737012 | 29818929 | 89.2 | 0.898 | 0.805 | 0.898 |
| rs1988564 | 32524439 | 113.2 | 0.898 | 0.794 | 0.898 |
| rs2071790 | 28974354 | 103.2 | 0.898 | 0.78 | 0.898 |
| rs465151 | 33248068 | 98.1 | 0.898 | 0.775 | 0.898 |
| rs1265759 | 32093150 | 100.2 | 0.898 | 0.721 | 0.898 |
| rs2239701 | 32806569 | 110.2 | 0.898 | 0.678 | 0.898 |
| rs3129883 | 32429654 | 103.2 | 0.898 | 0.635 | 0.898 |
| rs2032502 | 28969362 | 113.2 | 0.898 | 0.549 | 0.898 |
| rs3778612 | 29821020 | 107.2 | 0.898 | 0.512 | 0.898 |
| rs2246871 | 31540049 | 100.2 | 0.897 | 0.894 | 0.897 |
| rs2239707 | 31296077 | 100.1 | 0.897 | 0.862 | 0.897 |
| rs2734916 | 29950506 | 111.2 | 0.897 | 0.794 | 0.897 |
| rs2301753 | 30100029 | 100.2 | 0.897 | 0.761 | 0.897 |
| rs2735042 | 29518131 | 100.2 | 0.897 | 0.742 | 0.897 |
| rs3179375 | 29683795 | 110.2 | 0.897 | 0.619 | 0.897 |
| rs3129869 | 32176428 | 110.2 | 0.897 | 0.536 | 0.897 |
| rs7143 | 32610390 | 52.2 | 0.896 | 0.895 | 0.896 |
| rs2068204 | 33060165 | 103.2 | 0.896 | 0.847 | 0.896 |
| rs2745411 | 29289200 | 100.2 | 0.896 | 0.779 | 0.896 |
| rs462093 | 33248795 | 96.2 | 0.896 | 0.7 | 0.896 |
| rs3817966 | 32138604 | 107.2 | 0.895 | 0.861 | 0.895 |
| rs2256919 | 30001147 | 113.2 | 0.895 | 0.832 | 0.895 |
| rs3957010 | 29703758 | 108.2 | 0.895 | 0.812 | 0.895 |
| rs1610710 | 29834298 | 100.2 | 0.895 | 0.807 | 0.895 |
| rs2735067 | 30011489 | 113.2 | 0.895 | 0.719 | 0.895 |
| rs3128963 | 33057227 | 103.2 | 0.895 | 0.654 | 0.895 |
| rs7382938 | 33091783 | 116.1 | 0.895 | 0.624 | 0.895 |
| rs3828901 | 31234476 | 107.2 | 0.894 | 0.858 | 0.894 |
| rs3131043 | 30529224 | 103.2 | 0.894 | 0.822 | 0.894 |
| rs2107197 | 29590452 | 103.1 | 0.893 | 0.89 | 0.893 |
| rs3106190 | 33282076 | 103.1 | 0.893 | 0.675 | 0.893 |
| rs1633102 | 29469579 | 89.2 | 0.892 | 0.87 | 0.892 |
| rs3117120 | 32087561 | 103.2 | 0.892 | 0.817 | 0.892 |
| rs4713610 | 33100656 | 111.2 | 0.892 | 0.799 | 0.892 |
| rs2076522 | 32141936 | 98.1 | 0.892 | 0.785 | 0.892 |
| rs2853937 | 31311861 | 111.2 | 0.892 | 0.559 | 0.892 |
| rs887464 | 30916678 | 110.2 | 0.891 | 0.768 | 0.891 |
| rs2074466 | 29470738 | 98.2 | 0.891 | 0.735 | 0.891 |
| rs7382649 | 32777623 | 116.1 | 0.891 | 0.712 | 0.891 |
| rs7452209 | 31375933 | 116.1 | 0.891 | 0.676 | 0.891 |
| rs5007238 | 29709673 | 113.2 | 0.891 | 0.547 | 0.891 |
| rs757262 | 30175727 | 113.2 | 0.89 | 0.847 | 0.89 |
| rs1611407 | 29951708 | 89.2 | 0.89 | 0.81 | 0.89 |
| rs1655937 | 29666008 | 111.2 | 0.89 | 0.8 | 0.89 |
| rs2269704 | 30718091 | 100.2 | 0.89 | 0.729 | 0.89 |
| rs2734331 | 31701109 | 110.2 | 0.89 | 0.683 | 0.89 |
| rs3998178 | 32625987 | 111.2 | 0.889 | 0.829 | 0.889 |
| rs885914 | 29973525 | 100.2 | 0.889 | 0.767 | 0.889 |
| rs6925041 | 32471768 | 116.1 | 0.888 | 0.881 | 0.888 |
| rs441126 | 32973962 | 80.2 | 0.888 | 0.781 | 0.888 |
| rs2394604 | 29140023 | 100.2 | 0.888 | 0.736 | 0.888 |
| rs2074502 | 30445036 | 98.2 | 0.887 | 0.817 | 0.887 |
| rs3815100 | 31295822 | 107.2 | 0.887 | 0.807 | 0.887 |
| rs1632932 | 29862995 | 98.2 | 0.887 | 0.773 | 0.887 |
| rs2076524 | 32141441 | 98.1 | 0.887 | 0.758 | 0.887 |
| rs7759127 | 31300296 | 116.1 | 0.886 | 0.877 | 0.886 |
| rs3765606 | 29746708 | 107.2 | 0.886 | 0.84 | 0.886 |
| rs7381988 | 31305994 | 116.1 | 0.886 | 0.836 | 0.886 |
| rs2071479 | 32551869 | 100.2 | 0.886 | 0.741 | 0.886 |
| rs4986978 | 31311158 | 113.2 | 0.886 | 0.67 | 0.886 |
| rs2071472 | 32778035 | 100.2 | 0.885 | 0.846 | 0.885 |
| rs7349863 | 29461284 | 116.1 | 0.885 | 0.783 | 0.885 |
| rs3093665 | 31604072 | 103.1 | 0.885 | 0.732 | 0.885 |
| rs3132132 | 32903414 | 103.2 | 0.885 | 0.614 | 0.885 |
| rs3823318 | 29489336 | 107.2 | 0.884 | 0.816 | 0.884 |
| rs2106072 | 29924121 | 108.2 | 0.884 | 0.724 | 0.884 |
| rs3130654 | 30593833 | 113.2 | 0.883 | 0.749 | 0.883 |
| rs2857130 | 32777950 | 100.2 | 0.882 | 0.812 | 0.882 |
| rs1264300 | 30943996 | 100.2 | 0.882 | 0.78 | 0.882 |
| rs909727 | 29490657 | 113.2 | 0.882 | 0.742 | 0.882 |
| rs4151670 | 31686290 | 110.2 | 0.882 | 0.698 | 0.882 |
| rs1419637 | 29423556 | 113.2 | 0.881 | 0.88 | 0.881 |
| rs2532934 | 30955751 | 100.2 | 0.881 | 0.722 | 0.881 |
| rs1632981 | 29836257 | 100.2 | 0.88 | 0.876 | 0.88 |
| rs7383287 | 32784620 | 116.1 | 0.88 | 0.729 | 0.88 |
| rs2071477 | 32818761 | 96.2 | 0.88 | 0.661 | 0.88 |
| rs2071652 | 29406075 | 98.2 | 0.879 | 0.81 | 0.879 |
| rs7756516 | 32725485 | 116.1 | 0.879 | 0.793 | 0.879 |
| rs2734981 | 29592450 | 110.2 | 0.879 | 0.781 | 0.879 |
| rs3823339 | 29683726 | 107.2 | 0.879 | 0.772 | 0.879 |
| rs7770557 | 30089903 | 116.1 | 0.879 | 0.727 | 0.879 |
| rs1054175 | 29915189 | 110.2 | 0.879 | 0.689 | 0.879 |
| rs3131786 | 30962671 | 103.2 | 0.878 | 0.712 | 0.878 |
| rs2844686 | 30713730 | 100.2 | 0.878 | 0.382 | 0.878 |
| rs1611653 | 29907725 | 89.2 | 0.877 | 0.876 | 0.877 |
| rs2242655 | 31686133 | 98.2 | 0.877 | 0.861 | 0.877 |
| rs969891 | 32087172 | 113.2 | 0.877 | 0.773 | 0.877 |
| rs2023609 | 30246792 | 113.2 | 0.877 | 0.734 | 0.877 |
| rs3129882 | 32429047 | 103.2 | 0.877 | 0.73 | 0.877 |
| rs3132553 | 31146003 | 113.2 | 0.877 | 0.662 | 0.877 |
| rs2233956 | 31142011 | 110.2 | 0.876 | 0.872 | 0.876 |
| rs3128930 | 33068654 | 116.2 | 0.876 | 0.822 | 0.876 |
| rs3130560 | 31161237 | 110.2 | 0.876 | 0.818 | 0.876 |
| rs1042141 | 31144272 | 106.2 | 0.876 | 0.766 | 0.876 |
| rs2256543 | 29708591 | 100.2 | 0.876 | 0.744 | 0.876 |
| rs2071362 | 33034721 | 116.2 | 0.876 | 0.659 | 0.876 |
| rs4711313 | 32973128 | 116.2 | 0.876 | 0.365 | 0.876 |
| rs916568 | 29972810 | 103.2 | 0.875 | 0.818 | 0.875 |
| rs4988889 | 32629485 | 116.2 | 0.874 | 0.596 | 0.874 |
| rs3132524 | 31200546 | 103.2 | 0.873 | 0.778 | 0.873 |
| rs1033569 | 29028527 | 113.2 | 0.873 | 0.752 | 0.873 |
| rs4713242 | 29488978 | 111.2 | 0.873 | 0.745 | 0.873 |
| rs3095334 | 30513471 | 103.2 | 0.873 | 0.555 | 0.873 |
| rs2844666 | 30747539 | 100.2 | 0.872 | 0.825 | 0.872 |
| rs2517671 | 29998375 | 102.2 | 0.872 | 0.798 | 0.872 |
| rs6903130 | 32733777 | 116.1 | 0.872 | 0.682 | 0.872 |
| rs2179919 | 33060709 | 103.2 | 0.872 | 0.604 | 0.872 |
| rs2233984 | 31140070 | 108.2 | 0.871 | 0.583 | 0.871 |
| rs3117574 | 31495988 | 103.2 | 0.871 | 0.315 | 0.871 |
| rs356969 | 29747903 | 110.2 | 0.87 | 0.669 | 0.87 |
| rs3128972 | 33060221 | 103.2 | 0.869 | 0.834 | 0.869 |
| rs4084093 | 30743923 | 108.2 | 0.869 | 0.588 | 0.869 |
| rs805262 | 31687568 | 113.2 | 0.869 | 0.517 | 0.869 |
| rs2269555 | 29027396 | 100.2 | 0.868 | 0.867 | 0.868 |
| rs3095298 | 31143738 | 103.2 | 0.868 | 0.419 | 0.868 |
| rs189865 | 32915792 | 100.2 | 0.867 | 0.853 | 0.867 |
| rs3130991 | 31151124 | 103.2 | 0.867 | 0.832 | 0.867 |
| rs1061235 | 29684056 | 108.2 | 0.867 | 0.829 | 0.867 |
| rs3823421 | 31164932 | 107.2 | 0.867 | 0.683 | 0.867 |
| rs4079877 | 28969930 | 108.2 | 0.866 | 0.81 | 0.866 |
| rs909968 | 29567362 | 113.2 | 0.866 | 0.806 | 0.866 |
| rs3218807 | 30936643 | 106.2 | 0.866 | 0.692 | 0.866 |
| rs760293 | 31382535 | 113.2 | 0.865 | 0.693 | 0.865 |
| rs5026743 | 32465722 | 113.2 | 0.864 | 0.731 | 0.864 |
| rs2213586 | 32183851 | 113.2 | 0.864 | 0.619 | 0.864 |
| rs3132709 | 29907479 | 103.2 | 0.863 | 0.764 | 0.863 |
| rs805287 | 31737414 | 113.2 | 0.863 | 0.754 | 0.863 |
| rs391755 | 32218460 | 100.1 | 0.863 | 0.686 | 0.863 |
| rs3765604 | 29746782 | 107.2 | 0.862 | 0.757 | 0.862 |
| rs1265087 | 31170630 | 100.2 | 0.862 | 0.647 | 0.862 |
| rs516535 | 32935725 | 108.2 | 0.862 | 0.538 | 0.862 |
| rs1632883 | 29686751 | 89.2 | 0.862 | 0.501 | 0.862 |
| rs7740076 | 29836080 | 116.1 | 0.862 | 0.467 | 0.862 |
| rs10885 | 31663429 | 108.2 | 0.862 | 0.448 | 0.862 |
| rs1042149 | 31143766 | 110.2 | 0.861 | 0.807 | 0.861 |
| rs3129859 | 32171696 | 103.2 | 0.861 | 0.791 | 0.861 |
| rs362546 | 29567273 | 100.2 | 0.861 | 0.776 | 0.861 |
| rs1633057 | 29497781 | 89.2 | 0.861 | 0.6 | 0.861 |
| rs3807032 | 30104568 | 107.2 | 0.861 | 0.564 | 0.861 |
| rs3130212 | 33067377 | 103.2 | 0.86 | 0.817 | 0.86 |
| rs423639 | 32981157 | 80.2 | 0.86 | 0.813 | 0.86 |
| rs3135000 | 32631272 | 103.1 | 0.859 | 0.717 | 0.859 |
| rs1264620 | 30030114 | 100.2 | 0.858 | 0.839 | 0.858 |
| rs1264703 | 29836174 | 100.2 | 0.858 | 0.521 | 0.858 |
| rs1465651 | 32902831 | 103.2 | 0.856 | 0.646 | 0.856 |
| rs7194 | 32431963 | 108.2 | 0.855 | 0.833 | 0.855 |
| rs213210 | 33168539 | 111.2 | 0.855 | 0.823 | 0.855 |
| rs2256028 | 31149956 | 110.2 | 0.855 | 0.765 | 0.855 |
| rs762815 | 32724430 | 111.2 | 0.855 | 0.712 | 0.855 |
| rs3868542 | 30916597 | 111.2 | 0.854 | 0.806 | 0.854 |
| rs5021449 | 32709373 | 116.2 | 0.854 | 0.794 | 0.854 |
| rs1632880 | 29978431 | 89.1 | 0.854 | 0.786 | 0.854 |
| rs7774954 | 32725757 | 116.1 | 0.854 | 0.717 | 0.854 |
| rs4713520 | 32282183 | 111.2 | 0.854 | 0.543 | 0.854 |
| rs6456895 | 29102443 | 116.1 | 0.852 | 0.808 | 0.852 |
| rs463302 | 33237411 | 94.1 | 0.852 | 0.717 | 0.852 |
| rs1265100 | 31166137 | 113.1 | 0.852 | 0.647 | 0.852 |
| rs3828875 | 31149926 | 107.2 | 0.852 | 0.62 | 0.852 |
| rs6917517 | 31143167 | 116.1 | 0.851 | 0.779 | 0.851 |
| rs3888777 | 30590533 | 108.2 | 0.851 | 0.683 | 0.851 |
| rs7769979 | 32725140 | 116.1 | 0.851 | 0.393 | 0.851 |
| rs3129931 | 32106273 | 103.1 | 0.85 | 0.834 | 0.85 |
| rs3868086 | 31543593 | 108.2 | 0.85 | 0.815 | 0.85 |
| rs7773068 | 32707800 | 116.1 | 0.85 | 0.798 | 0.85 |
| rs3778638 | 30862882 | 107.2 | 0.85 | 0.753 | 0.85 |
| rs3130843 | 28970766 | 103.2 | 0.85 | 0.726 | 0.85 |
| rs3885028 | 29832891 | 108.2 | 0.85 | 0.592 | 0.85 |
| rs3757327 | 30088207 | 107.2 | 0.85 | 0.541 | 0.85 |
| rs29225 | 29643493 | 102.1 | 0.849 | 0.806 | 0.849 |
| rs885937 | 29831634 | 113.2 | 0.849 | 0.797 | 0.849 |
| rs3129702 | 30003543 | 103.2 | 0.849 | 0.795 | 0.849 |
| rs3128968 | 33057700 | 103.2 | 0.849 | 0.782 | 0.849 |
| rs4713327 | 30444845 | 111.1 | 0.849 | 0.735 | 0.849 |
| rs987870 | 33035945 | 86.2 | 0.849 | 0.529 | 0.849 |
| rs7772410 | 31387604 | 116.1 | 0.848 | 0.821 | 0.848 |
| rs3998790 | 29488738 | 111.2 | 0.848 | 0.74 | 0.848 |
| rs733841 | 29783219 | 92.2 | 0.848 | 0.74 | 0.848 |
| rs6916716 | 30445949 | 116.1 | 0.848 | 0.577 | 0.848 |
| rs2395313 | 33060783 | 103.1 | 0.847 | 0.836 | 0.847 |
| rs7744001 | 32626696 | 116.1 | 0.847 | 0.827 | 0.847 |
| rs3757329 | 30089218 | 107.2 | 0.847 | 0.799 | 0.847 |
| rs6933135 | 29761679 | 116.1 | 0.847 | 0.629 | 0.847 |
| rs4713217 | 29432180 | 111.2 | 0.846 | 0.815 | 0.846 |
| rs3130198 | 33056903 | 103.2 | 0.846 | 0.679 | 0.846 |
| rs5027459 | 32720595 | 113.2 | 0.845 | 0.818 | 0.845 |
| rs2747430 | 29711023 | 100.2 | 0.844 | 0.843 | 0.844 |
| rs4248158 | 31313291 | 111.2 | 0.844 | 0.809 | 0.844 |
| rs2301227 | 33035261 | 100.2 | 0.844 | 0.775 | 0.844 |
| rs3668 | 32610448 | 36.2 | 0.844 | 0.42 | 0.844 |
| rs1233426 | 29565959 | 100.2 | 0.843 | 0.737 | 0.843 |
| rs3094093 | 30740762 | 103.2 | 0.842 | 0.809 | 0.842 |
| rs422951 | 32214410 | 113.2 | 0.842 | 0.56 | 0.842 |
| rs909729 | 29783592 | 94.2 | 0.842 | 0.491 | 0.842 |
| rs2534673 | 31236248 | 110.2 | 0.841 | 0.772 | 0.841 |
| rs6928482 | 32626859 | 116.1 | 0.841 | 0.764 | 0.841 |
| rs707938 | 31788196 | 110.2 | 0.841 | 0.716 | 0.841 |
| rs2844521 | 31139722 | 113.2 | 0.841 | 0.712 | 0.841 |
| rs3868075 | 30938573 | 113.2 | 0.84 | 0.789 | 0.84 |
| rs7766843 | 32456464 | 116.1 | 0.839 | 0.817 | 0.839 |
| rs4151651 | 31686372 | 110.2 | 0.839 | 0.804 | 0.839 |
| rs2394609 | 29460425 | 100.2 | 0.839 | 0.772 | 0.839 |
| rs2239805 | 32182133 | 103.2 | 0.839 | 0.678 | 0.839 |
| rs5007260 | 32398516 | 113.2 | 0.838 | 0.829 | 0.838 |
| rs2073044 | 32109743 | 98.2 | 0.838 | 0.474 | 0.838 |
| rs3765608 | 29746524 | 107.2 | 0.837 | 0.804 | 0.837 |
| rs769176 | 31606370 | 111.2 | 0.837 | 0.726 | 0.837 |
| rs7773694 | 32707900 | 116.1 | 0.836 | 0.823 | 0.836 |
| rs3128935 | 32973851 | 103.2 | 0.836 | 0.804 | 0.836 |
| rs2853950 | 31295483 | 100.2 | 0.835 | 0.736 | 0.835 |
| rs494620 | 31609471 | 113.2 | 0.835 | 0.603 | 0.835 |
| rs1633089 | 29778704 | 98.2 | 0.834 | 0.806 | 0.834 |
| rs2267642 | 30860223 | 100.2 | 0.834 | 0.806 | 0.834 |
| rs2259571 | 31642510 | 100.2 | 0.834 | 0.69 | 0.834 |
| rs1557608 | 30179784 | 113.2 | 0.834 | 0.667 | 0.834 |
| rs2530708 | 30712449 | 111.1 | 0.833 | 0.768 | 0.833 |
| rs7769930 | 30089601 | 116.1 | 0.833 | 0.408 | 0.833 |
| rs2097274 | 32613469 | 111.2 | 0.832 | 0.696 | 0.832 |
| rs422878 | 29593400 | 110.2 | 0.831 | 0.778 | 0.831 |
| rs6457643 | 32705984 | 116.1 | 0.831 | 0.675 | 0.831 |
| rs7381617 | 31547789 | 116.1 | 0.831 | 0.566 | 0.831 |
| rs3129270 | 33098870 | 103.2 | 0.83 | 0.626 | 0.83 |
| rs1632914 | 29658004 | 89.2 | 0.828 | 0.665 | 0.828 |
| rs3129808 | 30106312 | 103.2 | 0.828 | 0.565 | 0.828 |
| rs4713604 | 32973152 | 116.2 | 0.828 | 0.439 | 0.828 |
| rs241436 | 32568633 | 110.2 | 0.827 | 0.784 | 0.827 |
| rs3132555 | 31143716 | 113.2 | 0.827 | 0.437 | 0.827 |
| rs2517461 | 30957390 | 100.2 | 0.827 | 0.433 | 0.827 |
| rs5021448 | 32709272 | 113.2 | 0.827 | 0.347 | 0.827 |
| rs4122198 | 29516351 | 111.2 | 0.826 | 0.729 | 0.826 |
| rs2227134 | 32721678 | 96.2 | 0.826 | 0.511 | 0.826 |
| rs4713605 | 32979375 | 111.2 | 0.825 | 0.823 | 0.825 |
| rs1265158 | 30911499 | 100.2 | 0.825 | 0.769 | 0.825 |
| rs3135382 | 32402917 | 103.2 | 0.825 | 0.593 | 0.825 |
| rs3129701 | 30003430 | 103.2 | 0.824 | 0.8 | 0.824 |
| rs2244546 | 31494553 | 111.2 | 0.824 | 0.729 | 0.824 |
| rs2395175 | 32430808 | 113.2 | 0.823 | 0.815 | 0.823 |
| rs2844793 | 30141263 | 110.1 | 0.823 | 0.786 | 0.823 |
| rs2395327 | 33070364 | 116.2 | 0.823 | 0.77 | 0.823 |
| rs1265074 | 31177039 | 100.2 | 0.823 | 0.743 | 0.823 |
| rs3117228 | 33057882 | 103.2 | 0.823 | 0.676 | 0.823 |
| rs429479 | 29143078 | 113.2 | 0.823 | 0.608 | 0.823 |
| rs1634720 | 30747941 | 111.2 | 0.822 | 0.808 | 0.822 |
| rs3095302 | 30863824 | 103.2 | 0.822 | 0.616 | 0.822 |
| rs423023 | 32208035 | 113.2 | 0.821 | 0.786 | 0.821 |
| rs6456880 | 29025797 | 116.1 | 0.821 | 0.771 | 0.821 |
| rs1065461 | 31191308 | 113.2 | 0.821 | 0.736 | 0.821 |
| rs6923313 | 31300678 | 116.1 | 0.821 | 0.632 | 0.821 |
| rs1367730 | 33059561 | 103.2 | 0.821 | 0.61 | 0.821 |
| rs1800629 | 31601712 | 116.2 | 0.82 | 0.778 | 0.82 |
| rs2240070 | 30132297 | 98.2 | 0.82 | 0.756 | 0.82 |
| rs520803 | 32214630 | 96.1 | 0.82 | 0.716 | 0.82 |
| rs3734836 | 29750831 | 107.2 | 0.82 | 0.664 | 0.82 |
| rs3132468 | 31534222 | 103.1 | 0.819 | 0.662 | 0.819 |
| rs3094159 | 29901861 | 103.2 | 0.818 | 0.734 | 0.818 |
| rs3180665 | 31665730 | 113.1 | 0.818 | 0.668 | 0.818 |
| rs2518027 | 31495195 | 113.1 | 0.817 | 0.719 | 0.817 |
| rs1362068 | 29512866 | 110.2 | 0.817 | 0.448 | 0.817 |
| rs1264542 | 30447711 | 113.1 | 0.816 | 0.743 | 0.816 |
| rs2223638 | 32095398 | 113.2 | 0.816 | 0.322 | 0.816 |
| rs2281390 | 33061116 | 103.2 | 0.815 | 0.752 | 0.815 |
| rs1265094 | 31170680 | 100.2 | 0.815 | 0.726 | 0.815 |
| rs2523994 | 30131102 | 100.2 | 0.815 | 0.675 | 0.815 |
| rs2857129 | 32778159 | 113.2 | 0.815 | 0.605 | 0.815 |
| rs886403 | 30728376 | 110.1 | 0.814 | 0.809 | 0.814 |
| rs2213565 | 32707975 | 113.2 | 0.814 | 0.803 | 0.814 |
| rs1419658 | 29921685 | 108.2 | 0.814 | 0.794 | 0.814 |
| rs2022109 | 32899182 | 94.2 | 0.814 | 0.783 | 0.814 |
| rs3128928 | 33067600 | 103.2 | 0.814 | 0.737 | 0.814 |
| rs707913 | 31145590 | 111.2 | 0.814 | 0.643 | 0.814 |
| rs2027856 | 32428473 | 113.2 | 0.814 | 0.535 | 0.814 |
| rs2747454 | 29425871 | 100.2 | 0.813 | 0.777 | 0.813 |
| rs3132552 | 31146072 | 113.2 | 0.813 | 0.742 | 0.813 |
| rs3130989 | 31150143 | 110.2 | 0.813 | 0.517 | 0.813 |
| rs3817964 | 32138754 | 107.2 | 0.812 | 0.811 | 0.812 |
| rs154971 | 32903135 | 100.2 | 0.812 | 0.735 | 0.812 |
| rs4713326 | 30444714 | 111.2 | 0.812 | 0.678 | 0.812 |
| rs3132499 | 30978678 | 103.2 | 0.811 | 0.764 | 0.811 |
| rs2395318 | 33067683 | 103.2 | 0.81 | 0.79 | 0.81 |
| rs3823343 | 29683869 | 107.2 | 0.81 | 0.769 | 0.81 |
| rs2071463 | 32805941 | 110.2 | 0.81 | 0.747 | 0.81 |
| rs2857770 | 29405474 | 100.2 | 0.809 | 0.784 | 0.809 |
| rs4248154 | 30773374 | 113.2 | 0.808 | 0.797 | 0.808 |
| rs3132595 | 30671158 | 103.2 | 0.808 | 0.749 | 0.808 |
| rs3749970 | 29113580 | 107.2 | 0.807 | 0.803 | 0.807 |
| rs541862 | 31687709 | 110.1 | 0.807 | 0.772 | 0.807 |
| rs2075582 | 31556433 | 103.2 | 0.807 | 0.769 | 0.807 |
| rs2854048 | 31961875 | 110.1 | 0.807 | 0.769 | 0.807 |
| rs1557607 | 30179409 | 113.2 | 0.807 | 0.751 | 0.807 |
| rs1362070 | 29513057 | 110.2 | 0.807 | 0.708 | 0.807 |
| rs2621337 | 32778185 | 113.2 | 0.807 | 0.692 | 0.807 |
| rs3807030 | 30094479 | 107.2 | 0.806 | 0.798 | 0.806 |
| rs2596502 | 31379784 | 100.2 | 0.806 | 0.786 | 0.806 |
| rs2076530 | 32383302 | 98.2 | 0.806 | 0.238 | 0.806 |
| rs885932 | 29903534 | 111.2 | 0.805 | 0.79 | 0.805 |
| rs2517598 | 30141041 | 110.1 | 0.805 | 0.714 | 0.805 |
| rs2524079 | 31301478 | 100.2 | 0.805 | 0.677 | 0.805 |
| rs4286818 | 30843042 | 111.2 | 0.805 | 0.601 | 0.805 |
| rs4151650 | 31685648 | 110.2 | 0.805 | 0.552 | 0.805 |
| rs2523933 | 29703050 | 100.2 | 0.804 | 0.795 | 0.804 |
| rs194675 | 32899155 | 113.2 | 0.804 | 0.744 | 0.804 |
| rs3130615 | 31534317 | 103.1 | 0.804 | 0.688 | 0.804 |
| rs2050188 | 32365686 | 113.2 | 0.804 | 0.53 | 0.804 |
| rs2395173 | 32430641 | 113.2 | 0.804 | 0.144 | 0.804 |
| rs1573299 | 30177167 | 113.2 | 0.803 | 0.784 | 0.803 |
| rs417812 | 32975528 | 80.2 | 0.803 | 0.709 | 0.803 |
| rs1633029 | 29517063 | 89.2 | 0.803 | 0.694 | 0.803 |
| rs7454158 | 32779436 | 116.1 | 0.803 | 0.643 | 0.803 |
| rs2516670 | 30205757 | 100.2 | 0.803 | 0.585 | 0.803 |
| rs4151652 | 31686704 | 110.1 | 0.802 | 0.77 | 0.802 |
| rs5026741 | 32465623 | 113.2 | 0.802 | 0.707 | 0.802 |
| rs2158286 | 30101752 | 100.2 | 0.802 | 0.686 | 0.802 |
| rs1051790 | 31149714 | 110.2 | 0.802 | 0.667 | 0.802 |
| rs3828799 | 32630598 | 107.2 | 0.801 | 0.756 | 0.801 |
| rs1737005 | 29823614 | 89.2 | 0.801 | 0.681 | 0.801 |
| rs3132946 | 31960785 | 103.2 | 0.801 | 0.676 | 0.801 |
| rs3132467 | 31534547 | 103.2 | 0.801 | 0.664 | 0.801 |
| rs2076542 | 32087884 | 111.1 | 0.801 | 0.661 | 0.801 |
| rs3828882 | 31150378 | 107.2 | 0.8 | 0.766 | 0.8 |
| rs3094717 | 30446824 | 103.2 | 0.8 | 0.627 | 0.8 |
| rs3094214 | 31149148 | 113.2 | 0.8 | 0.604 | 0.8 |
| rs2734984 | 29591589 | 100.2 | 0.799 | 0.79 | 0.799 |
| rs3131018 | 30914340 | 110.2 | 0.799 | 0.762 | 0.799 |
| rs419957 | 29568207 | 100.2 | 0.799 | 0.728 | 0.799 |
| rs1737075 | 29497470 | 89.2 | 0.799 | 0.72 | 0.799 |
| rs3765607 | 29746598 | 107.2 | 0.799 | 0.65 | 0.799 |
| rs1800683 | 31598752 | 113.2 | 0.799 | 0.51 | 0.799 |
| rs3763315 | 32147411 | 107.2 | 0.798 | 0.791 | 0.798 |
| rs2187824 | 32458588 | 96.2 | 0.798 | 0.665 | 0.798 |
| rs6457041 | 29823581 | 116.1 | 0.798 | 0.586 | 0.798 |
| rs2285797 | 30180892 | 100.2 | 0.797 | 0.794 | 0.797 |
| rs2621336 | 32778512 | 100.2 | 0.797 | 0.792 | 0.797 |
| rs4713614 | 33129434 | 111.2 | 0.797 | 0.77 | 0.797 |
| rs4428528 | 32449831 | 113.2 | 0.797 | 0.746 | 0.797 |
| rs2071365 | 33034235 | 98.2 | 0.797 | 0.67 | 0.797 |
| rs2246638 | 30010265 | 100.2 | 0.797 | 0.627 | 0.797 |
| rs1264697 | 30128325 | 100.2 | 0.796 | 0.781 | 0.796 |
| rs2280773 | 31993248 | 100.1 | 0.796 | 0.757 | 0.796 |
| rs4248169 | 32723342 | 111.2 | 0.795 | 0.781 | 0.795 |
| rs1632941 | 29567443 | 100.2 | 0.795 | 0.761 | 0.795 |
| rs1610653 | 29831851 | 100.2 | 0.795 | 0.749 | 0.795 |
| rs6911894 | 29566450 | 116.1 | 0.795 | 0.739 | 0.795 |
| rs3778614 | 29823881 | 107.2 | 0.795 | 0.709 | 0.795 |
| rs2523619 | 31376893 | 113.2 | 0.795 | 0.7 | 0.795 |
| rs3213483 | 32721365 | 111.2 | 0.795 | 0.655 | 0.795 |
| rs2857713 | 31311314 | 113.2 | 0.794 | 0.736 | 0.794 |
| rs2072632 | 31692233 | 110.1 | 0.794 | 0.629 | 0.794 |
| rs2074469 | 29470395 | 98.2 | 0.793 | 0.786 | 0.793 |
| rs2071876 | 32719183 | 103.2 | 0.793 | 0.768 | 0.793 |
| rs3819686 | 31149590 | 107.2 | 0.793 | 0.758 | 0.793 |
| rs1049414 | 32719364 | 103.2 | 0.793 | 0.723 | 0.793 |
| rs1048412 | 30093660 | 110.2 | 0.793 | 0.721 | 0.793 |
| rs2269420 | 31930910 | 100.1 | 0.792 | 0.735 | 0.792 |
| rs7750641 | 31190117 | 116.1 | 0.792 | 0.718 | 0.792 |
| rs2647027 | 32636584 | 108.2 | 0.792 | 0.43 | 0.792 |
| rs3815095 | 30863965 | 107.2 | 0.791 | 0.78 | 0.791 |
| rs3130999 | 30861955 | 110.2 | 0.791 | 0.667 | 0.791 |
| rs3134940 | 32169562 | 103.1 | 0.791 | 0.168 | 0.791 |
| rs743400 | 31377869 | 86.2 | 0.79 | 0.658 | 0.79 |
| rs4711187 | 29138345 | 111.2 | 0.79 | 0.641 | 0.79 |
| rs2395038 | 31231209 | 103.2 | 0.79 | 0.547 | 0.79 |
| rs2239689 | 31801041 | 98.2 | 0.789 | 0.754 | 0.789 |
| rs995185 | 29591593 | 110.2 | 0.789 | 0.666 | 0.789 |
| rs3830041 | 31962096 | 107.1 | 0.788 | 0.717 | 0.788 |
| rs2523945 | 30002707 | 110.2 | 0.788 | 0.677 | 0.788 |
| rs3130099 | 33283628 | 103.1 | 0.788 | 0.602 | 0.788 |
| rs3130374 | 30092094 | 103.2 | 0.787 | 0.644 | 0.787 |
| rs2524272 | 29453158 | 100.2 | 0.786 | 0.783 | 0.786 |
| rs3093558 | 31606500 | 103.2 | 0.786 | 0.694 | 0.786 |
| rs7656 | 32398715 | 108.2 | 0.786 | 0.619 | 0.786 |
| rs3093992 | 31549874 | 103.2 | 0.786 | 0.484 | 0.786 |
| rs2428509 | 29590571 | 100.1 | 0.785 | 0.673 | 0.785 |
| rs2071292 | 31926705 | 98.1 | 0.785 | 0.601 | 0.785 |
| rs107822 | 33177022 | 108.1 | 0.785 | 0.513 | 0.785 |
| rs3734860 | 31161268 | 107.2 | 0.785 | 0.254 | 0.785 |
| rs4151667 | 31972775 | 110.2 | 0.784 | 0.602 | 0.784 |
| rs887466 | 30914269 | 110.2 | 0.784 | 0.55 | 0.784 |
| rs2857096 | 32912512 | 100.2 | 0.784 | 0.404 | 0.784 |
| rs3130976 | 31142746 | 110.2 | 0.783 | 0.599 | 0.783 |
| rs6910473 | 31201636 | 116.1 | 0.782 | 0.673 | 0.782 |
| rs1633012 | 29821245 | 113.2 | 0.782 | 0.627 | 0.782 |
| rs2523399 | 29470837 | 100.2 | 0.781 | 0.773 | 0.781 |
| rs2071786 | 28974989 | 96.2 | 0.781 | 0.268 | 0.781 |
| rs3823359 | 30002676 | 107.2 | 0.78 | 0.714 | 0.78 |
| rs400488 | 30003417 | 100.2 | 0.78 | 0.696 | 0.78 |
| rs2239697 | 32553654 | 98.2 | 0.78 | 0.66 | 0.78 |
| rs4959041 | 30139153 | 111.2 | 0.78 | 0.592 | 0.78 |
| rs1042434 | 33029570 | 116.2 | 0.78 | 0.563 | 0.78 |
| rs3819275 | 31149472 | 107.2 | 0.78 | 0.538 | 0.78 |
| rs381218 | 32970802 | 80.2 | 0.779 | 0.762 | 0.779 |
| rs29230 | 29638845 | 98.2 | 0.779 | 0.738 | 0.779 |
| rs2301226 | 33036043 | 116.2 | 0.778 | 0.771 | 0.778 |
| rs742870 | 33077715 | 111.2 | 0.778 | 0.758 | 0.778 |
| rs6905862 | 31188444 | 116.1 | 0.777 | 0.741 | 0.777 |
| rs3129938 | 32107252 | 103.2 | 0.777 | 0.691 | 0.777 |
| rs1736939 | 29564143 | 101.2 | 0.777 | 0.47 | 0.777 |
| rs4548006 | 32719166 | 113.2 | 0.777 | 0.461 | 0.777 |
| rs2857767 | 29405026 | 100.2 | 0.776 | 0.704 | 0.776 |
| rs241442 | 32567925 | 110.2 | 0.776 | 0.508 | 0.776 |
| rs3093671 | 31605661 | 111.2 | 0.775 | 0.712 | 0.775 |
| rs2857433 | 30181405 | 100.2 | 0.775 | 0.646 | 0.775 |
| rs1800453 | 32808388 | 96.2 | 0.775 | 0.539 | 0.775 |
| rs1049628 | 30927919 | 108.2 | 0.774 | 0.724 | 0.774 |
| rs2769 | 31380634 | 101.2 | 0.773 | 0.568 | 0.773 |
| rs3763295 | 31646775 | 107.2 | 0.772 | 0.765 | 0.772 |
| rs3763338 | 28956863 | 116.2 | 0.772 | 0.761 | 0.772 |
| rs6910733 | 29761908 | 116.1 | 0.772 | 0.712 | 0.772 |
| rs3830037 | 31962377 | 107.1 | 0.771 | 0.649 | 0.771 |
| rs2858330 | 32429472 | 100.2 | 0.77 | 0.494 | 0.77 |
| rs1076711 | 32071131 | 86.2 | 0.77 | 0.438 | 0.77 |
| rs2272874 | 29467003 | 100.2 | 0.769 | 0.768 | 0.769 |
| rs762324 | 30516617 | 111.2 | 0.769 | 0.752 | 0.769 |
| rs2061952 | 32779129 | 111.2 | 0.769 | 0.731 | 0.769 |
| rs4647195 | 31311715 | 111.2 | 0.769 | 0.691 | 0.769 |
| rs2523400 | 29470542 | 100.2 | 0.769 | 0.643 | 0.769 |
| rs1041981 | 31311542 | 111.2 | 0.769 | 0.616 | 0.769 |
| rs1367729 | 33059715 | 103.2 | 0.769 | 0.445 | 0.769 |
| rs2523943 | 30003309 | 100.2 | 0.768 | 0.661 | 0.768 |
| rs1233421 | 29563952 | 100.2 | 0.768 | 0.624 | 0.768 |
| rs4988888 | 32629726 | 116.2 | 0.768 | 0.544 | 0.768 |
| rs4713260 | 29666407 | 111.1 | 0.767 | 0.743 | 0.767 |
| rs3095227 | 31549743 | 103.2 | 0.767 | 0.71 | 0.767 |
| rs2596538 | 31139390 | 110.2 | 0.767 | 0.624 | 0.767 |
| rs1480382 | 32735686 | 88.2 | 0.767 | 0.519 | 0.767 |
| rs2229699 | 31607537 | 98.2 | 0.767 | 0.505 | 0.767 |
| rs2276447 | 31384819 | 100.2 | 0.766 | 0.761 | 0.766 |
| rs2074511 | 30950188 | 111.2 | 0.766 | 0.702 | 0.766 |
| rs2285795 | 30182114 | 100.2 | 0.766 | 0.625 | 0.766 |
| rs2523959 | 29710736 | 110.2 | 0.766 | 0.624 | 0.766 |
| rs5020983 | 30000760 | 113.2 | 0.766 | 0.624 | 0.766 |
| rs2071353 | 33037322 | 98.2 | 0.766 | 0.559 | 0.766 |
| rs1610646 | 29823338 | 98.2 | 0.765 | 0.759 | 0.765 |
| rs3117035 | 33079243 | 103.2 | 0.765 | 0.691 | 0.765 |
| rs2071470 | 32778168 | 100.2 | 0.765 | 0.663 | 0.765 |
| rs376892 | 32974334 | 80.2 | 0.765 | 0.631 | 0.765 |
| rs1631950 | 29566179 | 89.2 | 0.765 | 0.466 | 0.765 |
| rs206781 | 32716890 | 106.2 | 0.764 | 0.763 | 0.764 |
| rs2071592 | 31574059 | 103.2 | 0.764 | 0.641 | 0.764 |
| rs4713274 | 29708251 | 111.2 | 0.764 | 0.628 | 0.764 |
| rs4959119 | 32616486 | 111.2 | 0.764 | 0.438 | 0.764 |
| rs3129744 | 32458051 | 103.1 | 0.763 | 0.522 | 0.763 |
| rs1737086 | 29779654 | 110.2 | 0.762 | 0.715 | 0.762 |
| rs2523960 | 29710710 | 110.2 | 0.762 | 0.708 | 0.762 |
| rs5020984 | 30000734 | 113.2 | 0.762 | 0.708 | 0.762 |
| rs3093542 | 31311451 | 103.2 | 0.762 | 0.62 | 0.762 |
| rs2127680 | 32811444 | 113.2 | 0.761 | 0.744 | 0.761 |
| rs2844508 | 31495218 | 113.1 | 0.761 | 0.729 | 0.761 |
| rs3093554 | 31608088 | 103.2 | 0.761 | 0.701 | 0.761 |
| rs1268928 | 31139705 | 110.2 | 0.761 | 0.697 | 0.761 |
| rs2294881 | 32138361 | 111.2 | 0.761 | 0.664 | 0.761 |
| rs7773149 | 32707608 | 116.1 | 0.76 | 0.745 | 0.76 |
| rs2524197 | 30192375 | 111.2 | 0.76 | 0.593 | 0.76 |
| rs1419635 | 29423916 | 113.2 | 0.76 | 0.535 | 0.76 |
| rs7755774 | 32470680 | 116.1 | 0.759 | 0.702 | 0.759 |
| rs3131001 | 30862289 | 110.2 | 0.758 | 0.568 | 0.758 |
| rs1610676 | 29853952 | 89.2 | 0.757 | 0.739 | 0.757 |
| rs6901686 | 29778245 | 116.1 | 0.757 | 0.682 | 0.757 |
| rs3094200 | 30863890 | 103.2 | 0.756 | 0.741 | 0.756 |
| rs2523705 | 31222438 | 100.2 | 0.756 | 0.696 | 0.756 |
| rs885948 | 31201360 | 113.2 | 0.756 | 0.634 | 0.756 |
| rs2009658 | 31309002 | 103.2 | 0.755 | 0.683 | 0.755 |
| rs2517754 | 29667438 | 111.2 | 0.755 | 0.614 | 0.755 |
| rs2596499 | 31380181 | 100.2 | 0.755 | 0.518 | 0.755 |
| rs929156 | 29910457 | 111.2 | 0.755 | 0.419 | 0.755 |
| rs2076312 | 33134883 | 100.2 | 0.754 | 0.554 | 0.754 |
| rs3093666 | 31604414 | 103.1 | 0.753 | 0.736 | 0.753 |
| rs3132520 | 31203843 | 103.2 | 0.753 | 0.701 | 0.753 |
| rs7773175 | 31300267 | 116.1 | 0.753 | 0.628 | 0.753 |
| rs3116956 | 33130518 | 103.2 | 0.753 | 0.557 | 0.753 |
| rs3823417 | 31161695 | 107.2 | 0.752 | 0.644 | 0.752 |
| rs1265092 | 31168144 | 100.2 | 0.751 | 0.528 | 0.751 |
| rs204889 | 31856849 | 87.2 | 0.751 | 0.495 | 0.751 |
| rs910320 | 33068431 | 103.2 | 0.75 | 0.746 | 0.75 |
| rs2239886 | 30441458 | 98.2 | 0.75 | 0.724 | 0.75 |
| rs2158279 | 29428702 | 113.2 | 0.75 | 0.705 | 0.75 |
| rs463260 | 33249683 | 87.1 | 0.749 | 0.708 | 0.749 |
| rs2523713 | 30234061 | 110.2 | 0.749 | 0.441 | 0.749 |
| rs2072915 | 33163529 | 116.2 | 0.748 | 0.712 | 0.748 |
| rs2187578 | 31376229 | 113.2 | 0.748 | 0.347 | 0.748 |
| rs2246626 | 31537860 | 100.2 | 0.747 | 0.736 | 0.747 |
| rs2517672 | 29708020 | 110.2 | 0.747 | 0.334 | 0.747 |
| rs2076489 | 29638889 | 98.2 | 0.746 | 0.738 | 0.746 |
| rs1264322 | 30628652 | 100.2 | 0.745 | 0.727 | 0.745 |
| rs2523970 | 29709230 | 100.2 | 0.744 | 0.737 | 0.744 |
| rs2073722 | 31190449 | 98.2 | 0.744 | 0.599 | 0.744 |
| rs6915224 | 32487588 | 116.1 | 0.744 | 0.51 | 0.744 |
| rs209130 | 28930350 | 96.2 | 0.743 | 0.686 | 0.743 |
| rs5017092 | 32719034 | 113.2 | 0.743 | 0.578 | 0.743 |
| rs3130552 | 31142933 | 110.2 | 0.743 | 0.511 | 0.743 |
| rs2247720 | 29592160 | 100.2 | 0.742 | 0.69 | 0.742 |
| rs3807036 | 30105703 | 107.2 | 0.742 | 0.367 | 0.742 |
| rs1049622 | 30629615 | 102.2 | 0.741 | 0.66 | 0.741 |
| rs2179915 | 33067181 | 96.2 | 0.741 | 0.456 | 0.741 |
| rs6930217 | 29566220 | 116.1 | 0.74 | 0.7 | 0.74 |
| rs3093553 | 31608237 | 111.1 | 0.74 | 0.504 | 0.74 |
| rs6457597 | 32470203 | 116.1 | 0.74 | 0.44 | 0.74 |
| rs241437 | 32568441 | 110.2 | 0.739 | 0.641 | 0.739 |
| rs5026740 | 32465511 | 113.2 | 0.739 | 0.632 | 0.739 |
| rs15604 | 33260414 | 116.1 | 0.739 | 0.548 | 0.739 |
| rs2071800 | 32484900 | 98.2 | 0.738 | 0.732 | 0.738 |
| rs2844522 | 31139458 | 111.2 | 0.738 | 0.722 | 0.738 |
| rs2516409 | 31522143 | 111.2 | 0.738 | 0.657 | 0.738 |
| rs7770592 | 29458172 | 116.1 | 0.737 | 0.651 | 0.737 |
| rs444013 | 29294404 | 111.2 | 0.736 | 0.735 | 0.736 |
| rs2844846 | 29777275 | 113.2 | 0.736 | 0.701 | 0.736 |
| rs3757346 | 30860895 | 107.2 | 0.736 | 0.692 | 0.736 |
| rs3134929 | 32211848 | 111.1 | 0.736 | 0.689 | 0.736 |
| rs401775 | 31701895 | 110.1 | 0.736 | 0.638 | 0.736 |
| rs6924267 | 32468059 | 116.1 | 0.736 | 0.413 | 0.736 |
| rs2517673 | 29708000 | 110.2 | 0.736 | 0.33 | 0.736 |
| rs1736980 | 29834450 | 89.2 | 0.735 | 0.677 | 0.735 |
| rs1611203 | 29824925 | 89.2 | 0.734 | 0.594 | 0.734 |
| rs7768484 | 29916363 | 116.1 | 0.733 | 0.713 | 0.733 |
| rs7741100 | 29830694 | 116.1 | 0.733 | 0.636 | 0.733 |
| rs2294884 | 32138016 | 100.2 | 0.733 | 0.612 | 0.733 |
| rs2308935 | 33029500 | 100.2 | 0.733 | 0.594 | 0.733 |
| rs2282850 | 33268551 | 100.2 | 0.732 | 0.666 | 0.732 |
| rs2073154 | 29427252 | 98.2 | 0.732 | 0.654 | 0.732 |
| rs1265095 | 31170430 | 100.2 | 0.731 | 0.661 | 0.731 |
| rs3095317 | 30859429 | 103.2 | 0.731 | 0.555 | 0.731 |
| rs3778630 | 30862086 | 107.2 | 0.731 | 0.421 | 0.731 |
| rs3869090 | 30648016 | 111.1 | 0.73 | 0.644 | 0.73 |
| rs415929 | 32215059 | 113.2 | 0.73 | 0.566 | 0.73 |
| rs2747431 | 29711081 | 100.2 | 0.729 | 0.671 | 0.729 |
| rs2428507 | 30000064 | 101.2 | 0.729 | 0.549 | 0.729 |
| rs2295666 | 31689094 | 100.2 | 0.728 | 0.727 | 0.728 |
| rs1233427 | 29564521 | 100.2 | 0.728 | 0.645 | 0.728 |
| rs7774644 | 32725643 | 116.1 | 0.728 | 0.597 | 0.728 |
| rs3095309 | 31152278 | 110.1 | 0.726 | 0.5 | 0.726 |
| rs5872 | 31696571 | 106.1 | 0.725 | 0.71 | 0.725 |
| rs1033500 | 32333512 | 113.2 | 0.725 | 0.649 | 0.725 |
| rs3763306 | 32140400 | 111.2 | 0.724 | 0.522 | 0.724 |
| rs635688 | 32936576 | 110.1 | 0.724 | 0.44 | 0.724 |
| rs4151669 | 31685902 | 110.2 | 0.721 | 0.597 | 0.721 |
| rs2076527 | 32383700 | 98.2 | 0.72 | 0.404 | 0.72 |
| rs3178162 | 30941911 | 106.1 | 0.719 | 0.643 | 0.719 |
| rs241449 | 32567410 | 110.2 | 0.719 | 0.533 | 0.719 |
| rs4435981 | 32975065 | 111.2 | 0.717 | 0.67 | 0.717 |
| rs6456897 | 29103831 | 116.1 | 0.716 | 0.684 | 0.716 |
| rs3828923 | 29658590 | 107.2 | 0.716 | 0.682 | 0.716 |
| rs2179920 | 33060321 | 103.2 | 0.716 | 0.616 | 0.716 |
| rs3218806 | 30646422 | 106.2 | 0.716 | 0.574 | 0.716 |
| rs2076175 | 29778609 | 98.2 | 0.716 | 0.542 | 0.716 |
| rs3871246 | 30916189 | 113.2 | 0.715 | 0.594 | 0.715 |
| rs2281388 | 33061565 | 100.2 | 0.714 | 0.628 | 0.714 |
| rs3763314 | 32147375 | 107.2 | 0.714 | 0.269 | 0.714 |
| rs6913173 | 32636337 | 116.1 | 0.713 | 0.698 | 0.713 |
| rs3873408 | 31496591 | 113.2 | 0.711 | 0.629 | 0.711 |
| rs3997995 | 31380339 | 113.2 | 0.709 | 0.57 | 0.709 |
| rs2523924 | 30745982 | 100.2 | 0.708 | 0.611 | 0.708 |
| rs2239517 | 30925928 | 113.1 | 0.708 | 0.359 | 0.708 |
| rs3094225 | 31173872 | 103.2 | 0.707 | 0.696 | 0.707 |
| rs3869117 | 30976681 | 113.2 | 0.707 | 0.63 | 0.707 |
| rs3734837 | 30141233 | 107.1 | 0.707 | 0.519 | 0.707 |
| rs2524180 | 30196888 | 100.2 | 0.705 | 0.604 | 0.705 |
| rs2844804 | 30002509 | 110.2 | 0.704 | 0.537 | 0.704 |
| rs2206618 | 32095301 | 113.2 | 0.704 | 0.508 | 0.704 |
| rs406424 | 29709781 | 113.2 | 0.703 | 0.679 | 0.703 |
| rs3830038 | 31962338 | 107.1 | 0.703 | 0.444 | 0.703 |
| rs1048709 | 31685693 | 110.2 | 0.701 | 0.595 | 0.701 |
| rs3093661 | 31602439 | 103.2 | 0.701 | 0.553 | 0.701 |
| rs2252856 | 30954243 | 100.1 | 0.701 | 0.52 | 0.701 |
| rs2857177 | 32523597 | 100.2 | 0.7 | 0.662 | 0.7 |
| rs9968 | 29563475 | 106.2 | 0.698 | 0.669 | 0.698 |
| rs365052 | 29710915 | 80.2 | 0.698 | 0.455 | 0.698 |
| rs1800624 | 31923144 | 96.1 | 0.697 | 0.624 | 0.697 |
| rs2856715 | 32621706 | 100.2 | 0.697 | 0.47 | 0.697 |
| rs3130444 | 31290938 | 103.2 | 0.696 | 0.669 | 0.696 |
| rs2071551 | 32731026 | 100.2 | 0.696 | 0.532 | 0.696 |
| rs2301221 | 33031662 | 100.2 | 0.696 | 0.446 | 0.696 |
| rs6927322 | 31149785 | 116.1 | 0.696 | 0.376 | 0.696 |
| rs7768179 | 30034379 | 116.1 | 0.695 | 0.657 | 0.695 |
| rs6913646 | 32724397 | 116.1 | 0.695 | 0.588 | 0.695 |
| rs2256820 | 29710864 | 110.2 | 0.693 | 0.68 | 0.693 |
| rs4713410 | 30753459 | 111.2 | 0.692 | 0.652 | 0.692 |
| rs872956 | 33069078 | 103.2 | 0.692 | 0.475 | 0.692 |
| rs4959077 | 31534364 | 111.2 | 0.691 | 0.671 | 0.691 |
| rs2071282 | 32214970 | 98.2 | 0.691 | 0.628 | 0.691 |
| rs1264328 | 30620900 | 100.2 | 0.691 | 0.614 | 0.691 |
| rs3918149 | 32707130 | 108.2 | 0.69 | 0.368 | 0.69 |
| rs2157051 | 32429381 | 103.2 | 0.69 | 0.156 | 0.69 |
| rs7750514 | 30034401 | 116.1 | 0.689 | 0.594 | 0.689 |
| rs3128964 | 33057265 | 103.2 | 0.689 | 0.459 | 0.689 |
| rs6912877 | 30011455 | 116.1 | 0.688 | 0.664 | 0.688 |
| rs1541268 | 30164163 | 113.2 | 0.687 | 0.259 | 0.687 |
| rs6906175 | 31429861 | 116.1 | 0.683 | 0.299 | 0.683 |
| rs2074506 | 30951282 | 113.2 | 0.681 | 0.612 | 0.681 |
| rs2239523 | 30860265 | 103.2 | 0.68 | 0.676 | 0.68 |
| rs2242665 | 31610067 | 103.2 | 0.68 | 0.662 | 0.68 |
| rs3131300 | 31922691 | 103.2 | 0.679 | 0.654 | 0.679 |
| rs465223 | 33361168 | 111.2 | 0.679 | 0.559 | 0.679 |
| rs3819299 | 31384121 | 107.2 | 0.676 | 0.613 | 0.676 |
| rs2844524 | 31139196 | 100.2 | 0.676 | 0.506 | 0.676 |
| rs6915440 | 32221961 | 116.1 | 0.675 | 0.623 | 0.675 |
| rs1614309 | 29516642 | 89.2 | 0.674 | 0.472 | 0.674 |
| rs2076183 | 29462061 | 98.2 | 0.673 | 0.66 | 0.673 |
| rs3763311 | 32146933 | 107.2 | 0.673 | 0.586 | 0.673 |
| rs3097650 | 33058887 | 103.2 | 0.673 | 0.167 | 0.673 |
| rs2743945 | 29513015 | 111.2 | 0.672 | 0.664 | 0.672 |
| rs1737087 | 29779007 | 111.2 | 0.672 | 0.42 | 0.672 |
| rs1611165 | 29854685 | 100.2 | 0.67 | 0.378 | 0.67 |
| rs3828913 | 31236553 | 107.2 | 0.67 | 0.213 | 0.67 |
| rs3763312 | 32147105 | 107.2 | 0.669 | 0.551 | 0.669 |
| rs2269711 | 30912370 | 103.2 | 0.669 | 0.51 | 0.669 |
| rs2243873 | 31922252 | 111.1 | 0.669 | 0.475 | 0.669 |
| rs2072108 | 31170818 | 98.2 | 0.668 | 0.624 | 0.668 |
| rs7770882 | 29428082 | 116.1 | 0.668 | 0.371 | 0.668 |
| rs1736935 | 29565201 | 110.2 | 0.667 | 0.293 | 0.667 |
| rs3823420 | 31161879 | 107.2 | 0.666 | 0.621 | 0.666 |
| rs2071571 | 32934044 | 98.2 | 0.666 | 0.455 | 0.666 |
| rs3093726 | 31605470 | 111.1 | 0.666 | 0.416 | 0.666 |
| rs973233 | 33132731 | 108.2 | 0.664 | 0.636 | 0.664 |
| rs1150772 | 30445385 | 100.2 | 0.664 | 0.564 | 0.664 |
| rs1264301 | 30943589 | 100.2 | 0.664 | 0.496 | 0.664 |
| rs367398 | 32217754 | 92.1 | 0.663 | 0.601 | 0.663 |
| rs241451 | 32567237 | 110.2 | 0.663 | 0.521 | 0.663 |
| rs2076528 | 32383680 | 98.2 | 0.662 | 0.407 | 0.662 |
| rs3115615 | 29910358 | 103.2 | 0.662 | 0.388 | 0.662 |
| rs2228088 | 31602286 | 98.2 | 0.66 | 0.593 | 0.66 |
| rs2269611 | 33285335 | 100.2 | 0.66 | 0.475 | 0.66 |
| rs408036 | 32975715 | 100.2 | 0.659 | 0.494 | 0.659 |
| rs3130998 | 30861703 | 110.2 | 0.657 | 0.515 | 0.657 |
| rs2022537 | 32072667 | 113.2 | 0.656 | 0.632 | 0.656 |
| rs2239520 | 31149724 | 103.2 | 0.656 | 0.468 | 0.656 |
| rs4993139 | 32629579 | 116.2 | 0.656 | 0.339 | 0.656 |
| rs3094215 | 31145487 | 111.2 | 0.655 | 0.619 | 0.655 |
| rs1063379 | 32716791 | 86.2 | 0.654 | 0.575 | 0.654 |
| rs259942 | 29785925 | 86.2 | 0.654 | 0.563 | 0.654 |
| rs3734861 | 31161286 | 107.2 | 0.654 | 0.302 | 0.654 |
| rs2499 | 29684300 | 108.2 | 0.653 | 0.595 | 0.653 |
| rs4713250 | 29866097 | 111.2 | 0.652 | 0.132 | 0.652 |
| rs2269426 | 31847256 | 100.2 | 0.651 | 0.529 | 0.651 |
| rs887467 | 30912422 | 100.2 | 0.649 | 0.636 | 0.649 |
| rs2269712 | 30911967 | 103.2 | 0.648 | 0.577 | 0.648 |
| rs2302396 | 31152095 | 103.2 | 0.645 | 0.551 | 0.645 |
| rs2008560 | 32724522 | 111.2 | 0.644 | 0.374 | 0.644 |
| rs1480383 | 32735647 | 88.2 | 0.643 | 0.451 | 0.643 |
| rs3129997 | 30718284 | 103.2 | 0.642 | 0.391 | 0.642 |
| rs2517588 | 29975472 | 111.2 | 0.639 | 0.441 | 0.639 |
| rs465474 | 33360594 | 98.2 | 0.637 | 0.626 | 0.637 |
| rs3218812 | 30938568 | 113.1 | 0.636 | 0.535 | 0.636 |
| rs2523791 | 29866076 | 100.2 | 0.633 | 0.124 | 0.633 |
| rs3828912 | 31236484 | 107.2 | 0.632 | 0.47 | 0.632 |
| rs2517444 | 30712534 | 111.1 | 0.632 | 0.145 | 0.632 |
| rs2257347 | 30953046 | 110.1 | 0.631 | 0.605 | 0.631 |
| rs364950 | 32977343 | 80.2 | 0.63 | 0.557 | 0.63 |
| rs2006164 | 32723777 | 111.2 | 0.63 | 0.544 | 0.63 |
| rs2857172 | 32525780 | 100.2 | 0.629 | 0.611 | 0.629 |
| rs3873243 | 29830196 | 111.2 | 0.629 | 0.327 | 0.629 |
| rs3763327 | 32184587 | 107.2 | 0.628 | 0.599 | 0.628 |
| rs1061801 | 33283785 | 106.2 | 0.627 | 0.601 | 0.627 |
| rs4713519 | 32033020 | 111.2 | 0.627 | 0.418 | 0.627 |
| rs909722 | 29833296 | 100.2 | 0.625 | 0.355 | 0.625 |
| rs2213569 | 32723140 | 113.2 | 0.621 | 0.617 | 0.621 |
| rs644827 | 31609199 | 110.2 | 0.62 | 0.608 | 0.62 |
| rs3763341 | 32972402 | 107.2 | 0.618 | 0.502 | 0.618 |
| rs2254287 | 33136669 | 100.2 | 0.617 | 0.614 | 0.617 |
| rs769178 | 31606195 | 111.2 | 0.617 | 0.587 | 0.617 |
| rs2270190 | 31141392 | 100.2 | 0.615 | 0.541 | 0.615 |
| rs986521 | 33128867 | 100.2 | 0.615 | 0.533 | 0.615 |
| rs206775 | 32725391 | 87.2 | 0.611 | 0.243 | 0.611 |
| rs241447 | 32567508 | 110.2 | 0.61 | 0.604 | 0.61 |
| rs2157336 | 32156818 | 103.2 | 0.61 | 0.49 | 0.61 |
| rs1044507 | 32189540 | 98.1 | 0.608 | 0.582 | 0.608 |
| rs3094204 | 30862750 | 110.2 | 0.608 | 0.566 | 0.608 |
| rs1611613 | 29916688 | 113.2 | 0.608 | 0.232 | 0.608 |
| rs1736927 | 29566873 | 108.2 | 0.607 | 0.598 | 0.607 |
| rs2855438 | 33131561 | 100.1 | 0.607 | 0.551 | 0.607 |
| rs3819284 | 31384521 | 107.2 | 0.607 | 0.502 | 0.607 |
| rs6913471 | 32365714 | 116.1 | 0.605 | 0.468 | 0.605 |
| rs969892 | 32087069 | 113.2 | 0.605 | 0.327 | 0.605 |
| rs2516507 | 31221971 | 100.2 | 0.602 | 0.462 | 0.602 |
| rs2071552 | 32807983 | 110.1 | 0.602 | 0.368 | 0.602 |
| rs375256 | 32977316 | 100.2 | 0.601 | 0.367 | 0.601 |
| rs2074465 | 29470901 | 98.2 | 0.599 | 0.572 | 0.599 |
| rs3130712 | 30980268 | 103.2 | 0.599 | 0.455 | 0.599 |
| rs2286654 | 30670992 | 111.2 | 0.596 | 0.577 | 0.596 |
| rs1265089 | 31169428 | 100.2 | 0.596 | 0.31 | 0.596 |
| rs915652 | 31519900 | 100.2 | 0.595 | 0.495 | 0.595 |
| rs362513 | 29299076 | 111.2 | 0.595 | 0.44 | 0.595 |
| rs3736710 | 33215306 | 107.2 | 0.594 | 0.516 | 0.594 |
| rs3130662 | 30774530 | 103.2 | 0.594 | 0.472 | 0.594 |
| rs2524056 | 31311508 | 113.2 | 0.594 | 0.331 | 0.594 |
| rs2395039 | 31231276 | 103.2 | 0.593 | 0.422 | 0.593 |
| rs683208 | 32708658 | 113.2 | 0.592 | 0.364 | 0.592 |
| rs1264320 | 30631758 | 106.2 | 0.591 | 0.566 | 0.591 |
| rs2074492 | 31302189 | 96.2 | 0.591 | 0.537 | 0.591 |
| rs4524656 | 32613832 | 113.2 | 0.591 | 0.532 | 0.591 |
| rs3130934 | 31189394 | 103.2 | 0.591 | 0.476 | 0.591 |
| rs1264457 | 30518794 | 100.2 | 0.591 | 0.422 | 0.591 |
| rs2242667 | 31554285 | 100.1 | 0.591 | 0.388 | 0.591 |
| rs7739536 | 29585928 | 116.1 | 0.589 | 0.47 | 0.589 |
| rs409715 | 32221751 | 80.2 | 0.589 | 0.395 | 0.589 |
| rs3828914 | 31236577 | 107.2 | 0.589 | 0.21 | 0.589 |
| rs2272991 | 29298357 | 102.2 | 0.587 | 0.49 | 0.587 |
| rs1362061 | 29141920 | 113.2 | 0.587 | 0.398 | 0.587 |
| rs3132377 | 28958067 | 103.1 | 0.587 | 0.377 | 0.587 |
| rs743771 | 32970291 | 113.2 | 0.586 | 0.521 | 0.586 |
| rs2523612 | 31379875 | 100.2 | 0.585 | 0.37 | 0.585 |
| rs4713220 | 29138253 | 111.2 | 0.583 | 0.58 | 0.583 |
| rs2301224 | 33031434 | 100.2 | 0.583 | 0.487 | 0.583 |
| rs3106191 | 33273203 | 103.2 | 0.581 | 0.267 | 0.581 |
| rs3749982 | 32633364 | 107.2 | 0.58 | 0.499 | 0.58 |
| rs1610678 | 29854145 | 89.2 | 0.58 | 0.117 | 0.58 |
| rs2524055 | 31311529 | 113.2 | 0.578 | 0.322 | 0.578 |
| rs2073721 | 31190423 | 98.2 | 0.577 | 0.414 | 0.577 |
| rs3132496 | 30979368 | 103.2 | 0.577 | 0.121 | 0.577 |
| rs2071653 | 29406686 | 103.2 | 0.575 | 0.567 | 0.575 |
| rs7772982 | 29403593 | 116.1 | 0.575 | 0.554 | 0.575 |
| rs2524094 | 31299349 | 100.2 | 0.575 | 0.469 | 0.575 |
| rs2252863 | 30954227 | 100.1 | 0.573 | 0.508 | 0.573 |
| rs2532939 | 30954218 | 100.1 | 0.572 | 0.571 | 0.572 |
| rs3129793 | 29038040 | 103.2 | 0.571 | 0.31 | 0.571 |
| rs3130926 | 31522591 | 110.2 | 0.57 | 0.368 | 0.57 |
| rs707918 | 31425490 | 113.1 | 0.57 | 0.304 | 0.57 |
| rs6925178 | 29035764 | 116.1 | 0.566 | 0.384 | 0.566 |
| rs6456902 | 29119757 | 116.1 | 0.566 | 0.192 | 0.566 |
| rs1610682 | 29863895 | 89.2 | 0.565 | 0.508 | 0.565 |
| rs2073720 | 31173643 | 98.2 | 0.565 | 0.495 | 0.565 |
| rs2071785 | 28975010 | 96.2 | 0.563 | 0.369 | 0.563 |
| rs2856993 | 32562160 | 106.2 | 0.563 | 0.271 | 0.563 |
| rs4959012 | 30175617 | 111.2 | 0.562 | 0.544 | 0.562 |
| rs614549 | 31611383 | 83.2 | 0.562 | 0.496 | 0.562 |
| rs3749963 | 32056183 | 107.1 | 0.562 | 0.443 | 0.562 |
| rs3757324 | 29459885 | 107.2 | 0.562 | 0.379 | 0.562 |
| rs6457150 | 30129367 | 116.1 | 0.562 | 0.356 | 0.562 |
| rs915651 | 31519942 | 100.2 | 0.561 | 0.504 | 0.561 |
| rs3130456 | 31187094 | 103.2 | 0.561 | 0.435 | 0.561 |
| rs1150739 | 30092134 | 100.2 | 0.559 | 0.264 | 0.559 |
| rs1611617 | 29919351 | 100.2 | 0.558 | 0.46 | 0.558 |
| rs3094139 | 29968753 | 103.2 | 0.558 | 0.232 | 0.558 |
| rs2394414 | 30843060 | 113.2 | 0.558 | 0.166 | 0.558 |
| rs11724 | 29292077 | 100.2 | 0.556 | 0.515 | 0.556 |
| rs1611185 | 29830915 | 113.2 | 0.556 | 0.499 | 0.556 |
| rs6940440 | 32454827 | 116.1 | 0.556 | 0.422 | 0.556 |
| rs7452208 | 31237066 | 116.1 | 0.555 | 0.256 | 0.555 |
| rs3763342 | 32972379 | 116.2 | 0.554 | 0.517 | 0.554 |
| rs2518030 | 31201840 | 100.2 | 0.553 | 0.479 | 0.553 |
| rs7772174 | 31387544 | 116.1 | 0.553 | 0.433 | 0.553 |
| rs3869097 | 30755228 | 113.2 | 0.552 | 0.5 | 0.552 |
| rs2272593 | 31660025 | 103.2 | 0.55 | 0.514 | 0.55 |
| rs3129792 | 29024283 | 103.2 | 0.549 | 0.515 | 0.549 |
| rs1264305 | 30943085 | 111.2 | 0.548 | 0.485 | 0.548 |
| rs4959047 | 30187311 | 111.2 | 0.547 | 0.488 | 0.547 |
| rs4713436 | 31145442 | 111.2 | 0.541 | 0.515 | 0.541 |
| rs7829 | 29684188 | 106.2 | 0.541 | 0.171 | 0.541 |
| rs3094696 | 30132201 | 103.2 | 0.535 | 0.395 | 0.535 |
| rs3828881 | 31150307 | 107.2 | 0.533 | 0.531 | 0.533 |
| rs3094000 | 31542964 | 113.2 | 0.533 | 0.496 | 0.533 |
| rs2855440 | 33131221 | 100.1 | 0.53 | 0.529 | 0.53 |
| rs6457697 | 32982660 | 116.1 | 0.529 | 0.152 | 0.529 |
| rs6919044 | 29072116 | 116.1 | 0.528 | 0.473 | 0.528 |
| rs1013518 | 29970270 | 108.2 | 0.526 | 0.387 | 0.526 |
| rs2144426 | 29407615 | 96.2 | 0.523 | 0.36 | 0.523 |
| rs4267952 | 29115784 | 111.2 | 0.523 | 0.36 | 0.523 |
| rs4947339 | 28978804 | 111.2 | 0.522 | 0.424 | 0.522 |
| rs4618569 | 30626009 | 111.2 | 0.522 | 0.295 | 0.522 |
| rs7767288 | 32831534 | 116.1 | 0.522 | 0.266 | 0.522 |
| rs3752528 | 32935687 | 107.2 | 0.521 | 0.517 | 0.521 |
| rs3956986 | 29491164 | 113.2 | 0.52 | 0.435 | 0.52 |
| rs2285320 | 30701824 | 100.2 | 0.52 | 0.327 | 0.52 |
| rs6938690 | 32832980 | 116.1 | 0.518 | 0.395 | 0.518 |
| rs2532932 | 30956243 | 113.2 | 0.518 | 0.347 | 0.518 |
| rs1634725 | 30752766 | 89.2 | 0.515 | 0.449 | 0.515 |
| rs3117097 | 32384447 | 103.2 | 0.515 | 0.337 | 0.515 |
| rs2621421 | 32735462 | 100.2 | 0.515 | 0.244 | 0.515 |
| rs2076541 | 32087972 | 111.1 | 0.514 | 0.425 | 0.514 |
| rs3094613 | 30931678 | 103.2 | 0.511 | 0.416 | 0.511 |
| rs4711186 | 29138287 | 111.2 | 0.51 | 0.479 | 0.51 |
| rs3130165 | 33131673 | 103.2 | 0.507 | 0.443 | 0.507 |
| rs2395312 | 33059883 | 103.2 | 0.506 | 0.292 | 0.506 |
| rs1627764 | 29957137 | 98.2 | 0.505 | 0.289 | 0.505 |
| rs204896 | 31834855 | 98.2 | 0.505 | 0.195 | 0.505 |
| rs7750714 | 30034531 | 116.1 | 0.502 | 0.264 | 0.502 |
| rs1054684 | 32778457 | 111.2 | 0.501 | 0.191 | 0.501 |
| rs7768931 | 30034555 | 116.1 | 0.5 | 0.316 | 0.5 |
| rs2213573 | 32486779 | 113.2 | 0.499 | 0.434 | 0.499 |
| rs241410 | 32632408 | 110.2 | 0.496 | 0.205 | 0.496 |
| rs2523734 | 30190876 | 100.2 | 0.495 | 0.484 | 0.495 |
| rs2163472 | 32976758 | 113.2 | 0.495 | 0.199 | 0.495 |
| rs6930003 | 29823196 | 116.1 | 0.484 | 0.123 | 0.484 |
| rs4713193 | 29037374 | 111.2 | 0.483 | 0.289 | 0.483 |
| rs1264321 | 30630102 | 110.2 | 0.482 | 0.471 | 0.482 |
| rs204878 | 32071248 | 113.2 | 0.481 | 0.298 | 0.481 |
| rs2301752 | 30100207 | 100.2 | 0.48 | 0.396 | 0.48 |
| rs6901830 | 33099791 | 116.1 | 0.472 | 0.349 | 0.472 |
| rs3998159 | 32452776 | 114.2 | 0.471 | 0.178 | 0.471 |
| rs2246986 | 31540939 | 113.2 | 0.466 | 0.41 | 0.466 |
| rs3117113 | 32096049 | 103.2 | 0.466 | 0.388 | 0.466 |
| rs2857128 | 32778368 | 100.2 | 0.464 | 0.326 | 0.464 |
| rs2516643 | 30566213 | 100.2 | 0.458 | 0.37 | 0.458 |
| rs3117103 | 32369057 | 103.2 | 0.458 | 0.366 | 0.458 |
| rs2233965 | 31141705 | 113.2 | 0.457 | 0.372 | 0.457 |
| rs6916394 | 31522961 | 116.1 | 0.456 | 0.398 | 0.456 |
| rs2074485 | 29665027 | 98.2 | 0.455 | 0.406 | 0.455 |
| rs1619893 | 29837080 | 89.2 | 0.455 | 0.231 | 0.455 |
| rs4449615 | 32719077 | 113.2 | 0.452 | 0.389 | 0.452 |
| rs3115611 | 29622464 | 103.2 | 0.452 | 0.307 | 0.452 |
| rs2301748 | 31142155 | 100.2 | 0.452 | 0.222 | 0.452 |
| rs3129845 | 32167034 | 103.2 | 0.452 | 0.218 | 0.452 |
| rs3130829 | 29298453 | 103.2 | 0.451 | 0.352 | 0.451 |
| rs6457125 | 30040971 | 116.1 | 0.451 | 0.309 | 0.451 |
| rs2571402 | 29703138 | 110.2 | 0.451 | 0.282 | 0.451 |
| rs2157605 | 30514809 | 110.1 | 0.448 | 0.349 | 0.448 |
| rs2275853 | 29747826 | 100.2 | 0.448 | 0.333 | 0.448 |
| rs3132710 | 29907423 | 103.2 | 0.446 | 0.376 | 0.446 |
| rs2854005 | 31375653 | 100.2 | 0.446 | 0.317 | 0.446 |
| rs1011985 | 29453617 | 113.2 | 0.446 | 0.269 | 0.446 |
| rs2075789 | 31767002 | 96.2 | 0.446 | 0.251 | 0.446 |
| rs2076182 | 29462471 | 98.1 | 0.445 | 0.262 | 0.445 |
| rs3132684 | 29761466 | 103.2 | 0.444 | 0.359 | 0.444 |
| rs238877 | 29120249 | 96.2 | 0.444 | 0.327 | 0.444 |
| rs2072681 | 31638157 | 98.1 | 0.444 | 0.315 | 0.444 |
| rs6919908 | 31304263 | 116.1 | 0.443 | 0.344 | 0.443 |
| rs2647045 | 32438857 | 100.2 | 0.443 | 0.324 | 0.443 |
| rs1632986 | 29835241 | 89.2 | 0.441 | 0.398 | 0.441 |
| rs2395470 | 31294570 | 100.2 | 0.441 | 0.357 | 0.441 |
| rs915668 | 29863415 | 110.2 | 0.44 | 0.381 | 0.44 |
| rs2295119 | 33062317 | 116.2 | 0.439 | 0.325 | 0.439 |
| rs2071536 | 32814860 | 98.1 | 0.438 | 0.228 | 0.438 |
| rs3130827 | 29293236 | 103.2 | 0.434 | 0.398 | 0.434 |
| rs3093556 | 31607132 | 111.2 | 0.434 | 0.363 | 0.434 |
| rs3734818 | 29824399 | 107.2 | 0.433 | 0.378 | 0.433 |
| rs4713270 | 29995478 | 111.2 | 0.433 | 0.362 | 0.433 |
| rs1988565 | 32524249 | 113.2 | 0.433 | 0.348 | 0.433 |
| rs1233333 | 29566478 | 89.2 | 0.433 | 0.272 | 0.433 |
| rs2074489 | 31299436 | 98.2 | 0.432 | 0.297 | 0.432 |
| rs1736981 | 29832893 | 89.2 | 0.431 | 0.359 | 0.431 |
| rs3129005 | 29921455 | 103.1 | 0.431 | 0.356 | 0.431 |
| rs3998357 | 31385813 | 108.2 | 0.43 | 0.36 | 0.43 |
| rs3132645 | 30180007 | 103.2 | 0.429 | 0.218 | 0.429 |
| rs1264548 | 30438888 | 92.2 | 0.429 | 0.201 | 0.429 |
| rs2428495 | 31380927 | 110.2 | 0.428 | 0.33 | 0.428 |
| rs3817824 | 29835221 | 107.2 | 0.427 | 0.343 | 0.427 |
| rs1632948 | 29564807 | 89.2 | 0.427 | 0.321 | 0.427 |
| rs1736998 | 29830662 | 89.2 | 0.426 | 0.348 | 0.426 |
| rs2535252 | 29404413 | 100.2 | 0.426 | 0.208 | 0.426 |
| rs1625485 | 29665147 | 98.1 | 0.425 | 0.277 | 0.425 |
| rs1811197 | 31386409 | 92.2 | 0.424 | 0.415 | 0.424 |
| rs2524173 | 30203602 | 100.1 | 0.423 | 0.376 | 0.423 |
| rs6925580 | 32471946 | 116.1 | 0.423 | 0.285 | 0.423 |
| rs3828903 | 31235497 | 107.2 | 0.422 | 0.41 | 0.422 |
| rs2596450 | 31496962 | 113.2 | 0.422 | 0.367 | 0.422 |
| rs6457042 | 29828592 | 116.1 | 0.421 | 0.405 | 0.421 |
| rs1799908 | 33145690 | 102.2 | 0.421 | 0.371 | 0.421 |
| rs8365 | 32168149 | 106.1 | 0.419 | 0.344 | 0.419 |
| rs3823340 | 29683759 | 107.2 | 0.419 | 0.334 | 0.419 |
| rs1611589 | 29912926 | 113.2 | 0.417 | 0.253 | 0.417 |
| rs2071291 | 32137948 | 98.1 | 0.414 | 0.399 | 0.414 |
| rs1233387 | 29618316 | 100.2 | 0.413 | 0.367 | 0.413 |
| rs6920823 | 32553557 | 116.1 | 0.413 | 0.359 | 0.413 |
| rs2251731 | 31138123 | 113.2 | 0.412 | 0.399 | 0.412 |
| rs6920830 | 32553601 | 116.1 | 0.411 | 0.286 | 0.411 |
| rs3873375 | 31310652 | 113.2 | 0.41 | 0.379 | 0.41 |
| rs1737004 | 29823730 | 89.2 | 0.41 | 0.37 | 0.41 |
| rs6457611 | 32626143 | 116.1 | 0.409 | 0.22 | 0.409 |
| rs2524088 | 31303580 | 100.2 | 0.408 | 0.392 | 0.408 |
| rs3749962 | 31807114 | 107.1 | 0.408 | 0.365 | 0.408 |
| rs1737085 | 29487148 | 110.2 | 0.408 | 0.295 | 0.408 |
| rs7382817 | 31529766 | 116.1 | 0.408 | 0.29 | 0.408 |
| rs2394413 | 30843040 | 113.2 | 0.408 | 0.151 | 0.408 |
| rs2073151 | 29427388 | 98.2 | 0.407 | 0.318 | 0.407 |
| rs1058026 | 31380437 | 86.2 | 0.407 | 0.299 | 0.407 |
| rs2272873 | 29834825 | 100.2 | 0.405 | 0.385 | 0.405 |
| rs1632933 | 29862889 | 98.2 | 0.404 | 0.399 | 0.404 |
| rs1632939 | 29567693 | 110.2 | 0.404 | 0.38 | 0.404 |
| rs3132704 | 29910464 | 103.2 | 0.404 | 0.314 | 0.404 |
| rs2523611 | 31380216 | 100.2 | 0.402 | 0.347 | 0.402 |
| rs3823313 | 29489113 | 110.2 | 0.402 | 0.227 | 0.402 |
| rs2524083 | 31301045 | 100.2 | 0.4 | 0.376 | 0.4 |
| rs983561 | 32429437 | 103.2 | 0.989 | 0.649 | 0.989 |
| rs915660 | 30914593 | 113.2 | 0.985 | 0.79 | 0.985 |
| rs1269839 | 32156676 | 103.1 | 0.983 | 0.81 | 0.983 |
| rs2050190 | 32364865 | 113.2 | 0.978 | 0.732 | 0.978 |
| rs8408 | 30638424 | 106.2 | 0.976 | 0.502 | 0.976 |
| rs3115573 | 31989600 | 103.2 | 0.964 | 0.794 | 0.964 |
| rs2230365 | 31296206 | 102.1 | 0.957 | 0.707 | 0.957 |
| rs2284178 | 31202883 | 100.2 | 0.956 | 0.639 | 0.956 |
| rs720467 | 31189621 | 98.2 | 0.955 | 0.715 | 0.955 |
| rs1842399 | 32524070 | 103.2 | 0.954 | 0.572 | 0.954 |
| rs2857106 | 32780985 | 111.2 | 0.951 | 0.928 | 0.951 |
| rs1894552 | 32166222 | 113.2 | 0.947 | 0.698 | 0.947 |
| rs1048664 | 30033270 | 102.2 | 0.946 | 0.801 | 0.946 |
| rs2076529 | 32383441 | 98.2 | 0.944 | 0.653 | 0.944 |
| rs2269422 | 31922051 | 100.1 | 0.941 | 0.799 | 0.941 |
| rs3135338 | 32171974 | 103.2 | 0.941 | 0.799 | 0.941 |
| rs3129907 | 32094502 | 103.2 | 0.939 | 0.726 | 0.939 |
| rs2621413 | 32737322 | 111.2 | 0.938 | 0.832 | 0.938 |
| rs3129848 | 32167806 | 103.2 | 0.936 | 0.894 | 0.936 |
| rs2395253 | 32716730 | 100.1 | 0.927 | 0.682 | 0.927 |
| rs3135365 | 32160012 | 103.2 | 0.924 | 0.716 | 0.924 |
| rs2395106 | 32219244 | 100.2 | 0.921 | 0.794 | 0.921 |
| rs2285796 | 30181652 | 103.2 | 0.921 | 0.744 | 0.921 |
| rs2284177 | 30860353 | 111.2 | 0.919 | 0.679 | 0.919 |
| rs3115563 | 32004395 | 103.2 | 0.914 | 0.877 | 0.914 |
| rs2074477 | 29902793 | 98.2 | 0.909 | 0.826 | 0.909 |
| rs2301755 | 30637376 | 100.2 | 0.908 | 0.756 | 0.908 |
| rs2057727 | 30358231 | 113.2 | 0.906 | 0.552 | 0.906 |
| rs2269705 | 30717985 | 100.2 | 0.905 | 0.725 | 0.905 |
| rs2076177 | 29758367 | 113.2 | 0.904 | 0.832 | 0.904 |
| rs2071285 | 31951188 | 100.2 | 0.9 | 0.8 | 0.9 |
| rs1109146 | 30690786 | 113.2 | 0.896 | 0.886 | 0.896 |
| rs2395178 | 32431144 | 113.2 | 0.895 | 0.811 | 0.895 |
| rs1978029 | 32733277 | 114.2 | 0.886 | 0.695 | 0.886 |
| rs408359 | 32167885 | 100.2 | 0.884 | 0.764 | 0.884 |
| rs2239529 | 30139086 | 100.2 | 0.878 | 0.761 | 0.878 |
| rs2269425 | 32143376 | 100.2 | 0.873 | 0.824 | 0.873 |
| rs2073048 | 32106190 | 98.2 | 0.867 | 0.821 | 0.867 |
| rs3806155 | 32144135 | 107.2 | 0.866 | 0.805 | 0.866 |
| rs436845 | 31968493 | 94.2 | 0.862 | 0.776 | 0.862 |
| rs434841 | 31961798 | 110.1 | 0.857 | 0.717 | 0.857 |
| rs1555115 | 32125277 | 113.2 | 0.847 | 0.827 | 0.847 |
| rs2284174 | 30774302 | 103.2 | 0.844 | 0.808 | 0.844 |
| rs2239806 | 32182064 | 103.2 | 0.844 | 0.722 | 0.844 |
| rs1610714 | 29834795 | 110.2 | 0.84 | 0.76 | 0.84 |
| rs2071289 | 31905893 | 98.2 | 0.834 | 0.695 | 0.834 |
| rs1264302 | 30653392 | 100.2 | 0.828 | 0.748 | 0.828 |
| rs1265099 | 31166240 | 100.1 | 0.824 | 0.263 | 0.824 |
| rs926070 | 32028323 | 86.2 | 0.817 | 0.636 | 0.817 |
| rs1150738 | 30095878 | 110.2 | 0.808 | 0.784 | 0.808 |
| rs2075015 | 30741323 | 98.2 | 0.798 | 0.415 | 0.798 |
| rs1576 | 31171211 | 106.2 | 0.786 | 0.783 | 0.786 |
| rs2074482 | 30097260 | 98.2 | 0.779 | 0.778 | 0.779 |
| rs2076523 | 32141592 | 98.1 | 0.772 | 0.664 | 0.772 |
| rs2395182 | 32154074 | 113.2 | 0.763 | 0.632 | 0.763 |
| rs241429 | 32797253 | 110.2 | 0.724 | 0.705 | 0.724 |
| rs565448 | 32031027 | 83.2 | 0.723 | 0.628 | 0.723 |
| rs1383265 | 32734679 | 113.2 | 0.962 | 0.751 | 0.962 |
| rs1150771 | 30445586 | 100.2 | 0.917 | 0.753 | 0.917 |
| rs2284189 | 32606911 | 116.2 | 0.914 | 0.76 | 0.914 |
| rs3213484 | 32719850 | 106.2 | 0.89 | 0.788 | 0.89 |
| rs2856716 | 32614668 | 100.2 | 0.888 | 0.816 | 0.888 |
| rs2076526 | 32383772 | 98.2 | 0.881 | 0.807 | 0.881 |
| rs3830122 | 32484982 | 107.2 | 0.876 | 0.851 | 0.876 |
| rs1882 | 31153669 | 106.2 | 0.84 | 0.698 | 0.84 |
| rs512559 | 31686820 | 110.1 | 0.825 | 0.621 | 0.825 |
| rs2857102 | 32787184 | 100.2 | 0.794 | 0.757 | 0.794 |
| rs2856698 | 32630912 | 100.1 | 0.766 | 0.672 | 0.766 |
| rs204989 | 31932609 | 87.1 | 0.692 | 0.564 | 0.692 |
| rs419788 | 31699557 | 96.2 | 0.998 | 0.687 | 0.998 |
| rs986475 | 31615386 | 113.2 | 0.993 | 0.775 | 0.993 |
| rs2763979 | 31853239 | 100.2 | 0.993 | 0.727 | 0.993 |
| rs1062470 | 31145238 | 103.2 | 0.992 | 0.593 | 0.992 |
| rs2523668 | 31496815 | 113.2 | 0.989 | 0.696 | 0.989 |
| rs2524069 | 31307104 | 100.2 | 0.988 | 0.751 | 0.988 |
| rs3135339 | 32170018 | 113.2 | 0.988 | 0.722 | 0.988 |
| rs206776 | 32724468 | 87.2 | 0.988 | 0.604 | 0.988 |
| rs1237485 | 28956896 | 108.2 | 0.987 | 0.611 | 0.987 |
| rs805290 | 31707241 | 100.2 | 0.986 | 0.716 | 0.986 |
| rs805268 | 31697015 | 100.1 | 0.986 | 0.658 | 0.986 |
| rs1345228 | 29203145 | 113.2 | 0.984 | 0.678 | 0.984 |
| rs7742523 | 29760409 | 116.1 | 0.983 | 0.724 | 0.983 |
| rs1053924 | 31891472 | 108.1 | 0.981 | 0.726 | 0.981 |
| rs1270942 | 31977681 | 110.1 | 0.981 | 0.68 | 0.981 |
| rs3129872 | 32432939 | 103.2 | 0.98 | 0.723 | 0.98 |
| rs805256 | 31694554 | 100.2 | 0.979 | 0.798 | 0.979 |
| rs3116998 | 33098678 | 103.2 | 0.979 | 0.563 | 0.979 |
| rs2517484 | 31134935 | 100.2 | 0.978 | 0.802 | 0.978 |
| rs886398 | 29905295 | 110.2 | 0.976 | 0.722 | 0.976 |
| rs984778 | 32170845 | 113.2 | 0.976 | 0.701 | 0.976 |
| rs1819784 | 29139038 | 92.2 | 0.971 | 0.69 | 0.971 |
| rs537757 | 32039258 | 108.2 | 0.97 | 0.837 | 0.97 |
| rs213199 | 33237203 | 111.1 | 0.969 | 0.742 | 0.969 |
| rs7762289 | 28972787 | 116.1 | 0.969 | 0.669 | 0.969 |
| rs1264709 | 29827234 | 100.2 | 0.969 | 0.611 | 0.969 |
| rs2071352 | 33037253 | 98.2 | 0.968 | 0.77 | 0.968 |
| rs2213584 | 32184016 | 113.2 | 0.968 | 0.737 | 0.968 |
| rs7382138 | 29496842 | 116.1 | 0.968 | 0.614 | 0.968 |
| rs660550 | 31608035 | 110.1 | 0.967 | 0.713 | 0.967 |
| rs3094626 | 30094381 | 103.2 | 0.966 | 0.777 | 0.966 |
| rs130078 | 31179378 | 103.2 | 0.965 | 0.65 | 0.965 |
| rs1610647 | 29824587 | 89.2 | 0.963 | 0.72 | 0.963 |
| rs2071594 | 31571444 | 103.2 | 0.963 | 0.671 | 0.963 |
| rs393603 | 29948281 | 80.2 | 0.963 | 0.627 | 0.963 |
| rs1034325 | 30139215 | 113.2 | 0.961 | 0.9 | 0.961 |
| rs971570 | 30233675 | 113.2 | 0.961 | 0.836 | 0.961 |
| rs3115635 | 29751251 | 103.2 | 0.961 | 0.825 | 0.961 |
| rs2524172 | 30204369 | 100.2 | 0.961 | 0.822 | 0.961 |
| rs2523746 | 30000843 | 100.2 | 0.961 | 0.675 | 0.961 |
| rs1362069 | 29513210 | 110.2 | 0.961 | 0.664 | 0.961 |
| rs3129203 | 33129204 | 116.2 | 0.959 | 0.748 | 0.959 |
| rs3871248 | 30916749 | 113.2 | 0.958 | 0.922 | 0.958 |
| rs4248157 | 31312901 | 111.2 | 0.958 | 0.876 | 0.958 |
| rs3130140 | 30128538 | 103.2 | 0.958 | 0.857 | 0.958 |
| rs2524100 | 31295077 | 100.2 | 0.958 | 0.827 | 0.958 |
| rs1800625 | 31923199 | 103.1 | 0.958 | 0.675 | 0.958 |
| rs2239709 | 31566344 | 98.2 | 0.957 | 0.808 | 0.957 |
| rs241439 | 32568294 | 110.2 | 0.956 | 0.862 | 0.956 |
| rs6907291 | 32952405 | 116.1 | 0.956 | 0.853 | 0.956 |
| rs6917477 | 30086778 | 116.1 | 0.956 | 0.845 | 0.956 |
| rs6923504 | 32453926 | 116.1 | 0.955 | 0.865 | 0.955 |
| rs6906021 | 32626921 | 116.1 | 0.955 | 0.67 | 0.955 |
| rs2849015 | 32218673 | 100.2 | 0.954 | 0.871 | 0.954 |
| rs2517462 | 30956989 | 100.1 | 0.953 | 0.935 | 0.953 |
| rs7382297 | 31306358 | 116.1 | 0.953 | 0.776 | 0.953 |
| rs6457713 | 33079223 | 116.1 | 0.953 | 0.743 | 0.953 |
| rs1075496 | 30719377 | 103.2 | 0.953 | 0.731 | 0.953 |
| rs3131083 | 29102525 | 103.2 | 0.952 | 0.823 | 0.952 |
| rs2256965 | 31613811 | 113.2 | 0.952 | 0.778 | 0.952 |
| rs3093662 | 31602870 | 103.2 | 0.951 | 0.819 | 0.951 |
| rs2395305 | 32978759 | 113.2 | 0.951 | 0.713 | 0.951 |
| rs3763304 | 32140112 | 107.2 | 0.95 | 0.896 | 0.95 |
| rs2227126 | 32486530 | 96.2 | 0.95 | 0.882 | 0.95 |
| rs261946 | 30042092 | 89.1 | 0.95 | 0.867 | 0.95 |
| rs4987411 | 29427080 | 113.2 | 0.949 | 0.775 | 0.949 |
| rs1633017 | 29853725 | 111.2 | 0.949 | 0.686 | 0.949 |
| rs7382061 | 30108754 | 116.1 | 0.949 | 0.564 | 0.949 |
| rs3129980 | 30529129 | 103.2 | 0.948 | 0.747 | 0.948 |
| rs3734838 | 30140998 | 107.1 | 0.947 | 0.85 | 0.947 |
| rs3129073 | 29386580 | 103.2 | 0.946 | 0.889 | 0.946 |
| rs1063355 | 32398471 | 106.2 | 0.946 | 0.676 | 0.946 |
| rs994321 | 29143111 | 113.2 | 0.946 | 0.653 | 0.946 |
| rs3129809 | 30106379 | 103.2 | 0.945 | 0.764 | 0.945 |
| rs7766854 | 32456487 | 116.1 | 0.945 | 0.691 | 0.945 |
| rs3763288 | 31141125 | 107.2 | 0.944 | 0.899 | 0.944 |
| rs630379 | 31693012 | 110.1 | 0.944 | 0.82 | 0.944 |
| rs2844845 | 29777998 | 100.2 | 0.944 | 0.814 | 0.944 |
| rs3130666 | 30510918 | 103.2 | 0.944 | 0.804 | 0.944 |
| rs2021723 | 30165122 | 113.2 | 0.944 | 0.771 | 0.944 |
| rs1634718 | 30743623 | 94.2 | 0.943 | 0.84 | 0.943 |
| rs1264539 | 30449418 | 100.1 | 0.942 | 0.753 | 0.942 |
| rs2844748 | 30108896 | 100.2 | 0.942 | 0.687 | 0.942 |
| rs805292 | 31748849 | 113.2 | 0.941 | 0.777 | 0.941 |
| rs7741884 | 29831007 | 116.1 | 0.941 | 0.565 | 0.941 |
| rs2245420 | 29853446 | 100.2 | 0.94 | 0.887 | 0.94 |
| rs259940 | 29782692 | 110.2 | 0.94 | 0.787 | 0.94 |
| rs2853935 | 31313170 | 100.2 | 0.94 | 0.784 | 0.94 |
| rs6911467 | 30032851 | 116.1 | 0.94 | 0.565 | 0.94 |
| rs3132712 | 29909461 | 103.2 | 0.939 | 0.843 | 0.939 |
| rs3763317 | 32147545 | 107.2 | 0.939 | 0.774 | 0.939 |
| rs2853939 | 31309934 | 100.2 | 0.938 | 0.696 | 0.938 |
| rs605203 | 31906001 | 100.1 | 0.937 | 0.866 | 0.937 |
| rs6457594 | 32469713 | 116.1 | 0.937 | 0.802 | 0.937 |
| rs2144014 | 33058844 | 96.2 | 0.937 | 0.574 | 0.937 |
| rs2534790 | 29294926 | 100.2 | 0.936 | 0.907 | 0.936 |
| rs986522 | 33128684 | 86.2 | 0.936 | 0.737 | 0.936 |
| rs805264 | 31682556 | 100.2 | 0.936 | 0.71 | 0.936 |
| rs7757269 | 29458642 | 116.1 | 0.935 | 0.83 | 0.935 |
| rs916570 | 29836789 | 110.2 | 0.934 | 0.831 | 0.934 |
| rs3093668 | 31605176 | 111.1 | 0.933 | 0.836 | 0.933 |
| rs928824 | 29995647 | 110.2 | 0.93 | 0.793 | 0.93 |
| rs3132682 | 30105177 | 103.2 | 0.93 | 0.783 | 0.93 |
| rs4248148 | 30512892 | 111.2 | 0.93 | 0.781 | 0.93 |
| rs707928 | 31801226 | 113.2 | 0.93 | 0.717 | 0.93 |
| rs3130375 | 30092490 | 103.2 | 0.93 | 0.711 | 0.93 |
| rs3097644 | 32716287 | 110.2 | 0.929 | 0.912 | 0.929 |
| rs1233397 | 29613589 | 100.2 | 0.928 | 0.824 | 0.928 |
| rs2023371 | 30142873 | 94.2 | 0.928 | 0.795 | 0.928 |
| rs2071540 | 32806329 | 111.2 | 0.928 | 0.546 | 0.928 |
| rs4713603 | 32972991 | 116.2 | 0.927 | 0.823 | 0.927 |
| rs3094014 | 31492277 | 103.2 | 0.927 | 0.784 | 0.927 |
| rs2856726 | 32437478 | 100.2 | 0.927 | 0.726 | 0.927 |
| rs2735005 | 29579222 | 100.2 | 0.927 | 0.529 | 0.927 |
| rs241414 | 32628558 | 87.2 | 0.926 | 0.811 | 0.926 |
| rs2516400 | 31540008 | 111.2 | 0.926 | 0.556 | 0.926 |
| rs2517416 | 30726687 | 100.2 | 0.923 | 0.806 | 0.923 |
| rs3749971 | 29113530 | 107.2 | 0.922 | 0.84 | 0.922 |
| rs6928431 | 30085178 | 116.1 | 0.922 | 0.768 | 0.922 |
| rs6911693 | 31548555 | 116.1 | 0.922 | 0.71 | 0.922 |
| rs1269852 | 31850948 | 100.2 | 0.922 | 0.638 | 0.922 |
| rs241457 | 32902901 | 100.2 | 0.921 | 0.883 | 0.921 |
| rs2077102 | 31382598 | 113.2 | 0.921 | 0.632 | 0.921 |
| rs1736995 | 29829076 | 101.2 | 0.921 | 0.436 | 0.921 |
| rs241413 | 32629757 | 87.2 | 0.92 | 0.863 | 0.92 |
| rs1362074 | 29451104 | 88.2 | 0.92 | 0.619 | 0.92 |
| rs2524222 | 30571886 | 100.2 | 0.919 | 0.893 | 0.919 |
| rs2857768 | 29405269 | 100.2 | 0.919 | 0.825 | 0.919 |
| rs2394390 | 30372579 | 103.2 | 0.919 | 0.592 | 0.919 |
| rs3218819 | 30650855 | 106.1 | 0.918 | 0.665 | 0.918 |
| rs2736176 | 31646242 | 110.2 | 0.917 | 0.785 | 0.917 |
| rs885933 | 29905601 | 108.2 | 0.917 | 0.778 | 0.917 |
| rs2517889 | 29865959 | 100.2 | 0.916 | 0.781 | 0.916 |
| rs2207337 | 28971000 | 113.2 | 0.916 | 0.553 | 0.916 |
| rs4713293 | 30163613 | 111.2 | 0.914 | 0.909 | 0.914 |
| rs2040410 | 32608410 | 94.2 | 0.914 | 0.525 | 0.914 |
| rs1557611 | 30179562 | 113.2 | 0.914 | 0.517 | 0.914 |
| rs3129942 | 32109040 | 103.2 | 0.913 | 0.884 | 0.913 |
| rs3094138 | 29969774 | 111.2 | 0.913 | 0.801 | 0.913 |
| rs3129304 | 32975190 | 116.2 | 0.913 | 0.801 | 0.913 |
| rs2071288 | 32169006 | 98.1 | 0.913 | 0.731 | 0.913 |
| rs6921644 | 33090551 | 116.1 | 0.913 | 0.645 | 0.913 |
| rs206777 | 32723303 | 87.2 | 0.911 | 0.864 | 0.911 |
| rs17719 | 30771753 | 106.2 | 0.91 | 0.587 | 0.91 |
| rs1024470 | 29428814 | 113.2 | 0.909 | 0.837 | 0.909 |
| rs620202 | 32935333 | 113.1 | 0.909 | 0.761 | 0.909 |
| rs409558 | 31766821 | 98.2 | 0.909 | 0.484 | 0.909 |
| rs3117330 | 29288348 | 103.1 | 0.907 | 0.781 | 0.907 |
| rs2071481 | 32813278 | 98.2 | 0.907 | 0.763 | 0.907 |
| rs2071544 | 32807641 | 111.2 | 0.907 | 0.729 | 0.907 |
| rs362512 | 29593084 | 111.2 | 0.906 | 0.899 | 0.906 |
| rs1056032 | 28933525 | 111.2 | 0.906 | 0.794 | 0.906 |
| rs4711185 | 29424044 | 111.2 | 0.906 | 0.777 | 0.906 |
| rs6457204 | 30378674 | 116.1 | 0.905 | 0.899 | 0.905 |
| rs7451190 | 31235347 | 116.1 | 0.905 | 0.747 | 0.905 |
| rs474534 | 31708865 | 94.1 | 0.905 | 0.589 | 0.905 |
| rs1480380 | 32906657 | 100.2 | 0.905 | 0.571 | 0.905 |
| rs6914285 | 31544258 | 116.1 | 0.904 | 0.885 | 0.904 |
| rs3129953 | 32387571 | 103.2 | 0.904 | 0.839 | 0.904 |
| rs6927487 | 29996800 | 116.1 | 0.903 | 0.805 | 0.903 |
| rs3095151 | 30960949 | 111.2 | 0.903 | 0.74 | 0.903 |
| rs1573298 | 30176932 | 113.2 | 0.902 | 0.888 | 0.902 |
| rs3104395 | 32456183 | 103.2 | 0.902 | 0.883 | 0.902 |
| rs2395316 | 33058707 | 100.2 | 0.902 | 0.756 | 0.902 |
| rs1264707 | 29833845 | 100.2 | 0.901 | 0.888 | 0.901 |
| rs3095313 | 30861357 | 103.2 | 0.901 | 0.788 | 0.901 |
| rs2735054 | 29471373 | 110.2 | 0.901 | 0.754 | 0.901 |
| rs886390 | 30105752 | 111.2 | 0.901 | 0.731 | 0.901 |
| rs2523721 | 30227002 | 100.2 | 0.9 | 0.887 | 0.9 |
| rs2239800 | 32708054 | 98.2 | 0.9 | 0.865 | 0.9 |
| rs2747466 | 29429327 | 100.2 | 0.9 | 0.651 | 0.9 |
| rs1029239 | 29908920 | 98.2 | 0.9 | 0.573 | 0.9 |
| rs2523676 | 31494915 | 113.2 | 0.899 | 0.888 | 0.899 |
| rs3757335 | 30516263 | 107.2 | 0.899 | 0.836 | 0.899 |
| rs760070 | 31690714 | 113.1 | 0.899 | 0.745 | 0.899 |
| rs2442719 | 31379290 | 100.2 | 0.899 | 0.357 | 0.899 |
| rs1573297 | 30177113 | 113.2 | 0.898 | 0.843 | 0.898 |
| rs3132569 | 31162252 | 113.2 | 0.898 | 0.803 | 0.898 |
| rs2844523 | 31139346 | 110.2 | 0.898 | 0.598 | 0.898 |
| rs2077573 | 30199109 | 96.2 | 0.897 | 0.845 | 0.897 |
| rs2249168 | 30729012 | 111.2 | 0.895 | 0.842 | 0.895 |
| rs2844780 | 29975284 | 113.2 | 0.895 | 0.791 | 0.895 |
| rs6457655 | 32737067 | 116.1 | 0.895 | 0.586 | 0.895 |
| rs7770024 | 32724907 | 116.1 | 0.895 | 0.495 | 0.895 |
| rs458434 | 33244273 | 87.2 | 0.894 | 0.872 | 0.894 |
| rs204894 | 32113647 | 96.1 | 0.894 | 0.855 | 0.894 |
| rs6905949 | 30201287 | 116.1 | 0.894 | 0.788 | 0.894 |
| rs3135376 | 32404946 | 103.2 | 0.894 | 0.784 | 0.894 |
| rs1018434 | 32052117 | 111.2 | 0.893 | 0.873 | 0.893 |
| rs204879 | 32062890 | 96.2 | 0.893 | 0.864 | 0.893 |
| rs3129943 | 32109452 | 103.2 | 0.893 | 0.83 | 0.893 |
| rs7772569 | 32707547 | 116.1 | 0.893 | 0.728 | 0.893 |
| rs2248902 | 31293436 | 108.2 | 0.892 | 0.878 | 0.892 |
| rs2517449 | 30980505 | 100.1 | 0.892 | 0.773 | 0.892 |
| rs2859448 | 31495197 | 113.1 | 0.892 | 0.674 | 0.892 |
| rs2857694 | 31646551 | 110.2 | 0.892 | 0.658 | 0.892 |
| rs3132671 | 29949045 | 103.2 | 0.891 | 0.5 | 0.891 |
| rs2395301 | 32970142 | 113.1 | 0.89 | 0.8 | 0.89 |
| rs2516455 | 31191330 | 100.2 | 0.89 | 0.681 | 0.89 |
| rs2294472 | 33091881 | 100.2 | 0.889 | 0.883 | 0.889 |
| rs2077580 | 31791601 | 96.2 | 0.887 | 0.661 | 0.887 |
| rs1061783 | 33284075 | 106.2 | 0.886 | 0.848 | 0.886 |
| rs3135024 | 33040530 | 103.2 | 0.885 | 0.725 | 0.885 |
| rs204994 | 31925755 | 87.1 | 0.885 | 0.651 | 0.885 |
| rs1059174 | 29756938 | 106.2 | 0.885 | 0.618 | 0.885 |
| rs1233422 | 29568269 | 100.2 | 0.884 | 0.718 | 0.884 |
| rs7772297 | 31387575 | 116.1 | 0.883 | 0.651 | 0.883 |
| rs3132613 | 30598323 | 103.2 | 0.883 | 0.351 | 0.883 |
| rs2272592 | 31757189 | 103.2 | 0.881 | 0.801 | 0.881 |
| rs2523790 | 29866221 | 100.2 | 0.881 | 0.75 | 0.881 |
| rs2071476 | 32818792 | 96.2 | 0.881 | 0.703 | 0.881 |
| rs2105903 | 32166413 | 113.2 | 0.878 | 0.873 | 0.878 |
| rs7382555 | 29827043 | 116.1 | 0.878 | 0.848 | 0.878 |
| rs3115663 | 31660524 | 103.2 | 0.878 | 0.839 | 0.878 |
| rs492899 | 31992272 | 113.1 | 0.878 | 0.753 | 0.878 |
| rs707939 | 31497446 | 110.2 | 0.877 | 0.811 | 0.877 |
| rs3094614 | 29952033 | 103.2 | 0.877 | 0.506 | 0.877 |
| rs2734990 | 29583263 | 113.2 | 0.876 | 0.855 | 0.876 |
| rs2273612 | 31684017 | 100.2 | 0.875 | 0.748 | 0.875 |
| rs438999 | 31699064 | 113.1 | 0.875 | 0.727 | 0.875 |
| rs206786 | 32705936 | 108.2 | 0.875 | 0.539 | 0.875 |
| rs362536 | 29297698 | 102.2 | 0.873 | 0.853 | 0.873 |
| rs2523395 | 29473268 | 113.2 | 0.873 | 0.82 | 0.873 |
| rs1064190 | 31135921 | 106.2 | 0.873 | 0.7 | 0.873 |
| rs3130267 | 33308246 | 116.2 | 0.873 | 0.693 | 0.873 |
| rs7762933 | 31223348 | 116.1 | 0.872 | 0.774 | 0.872 |
| rs3094211 | 31150168 | 110.2 | 0.872 | 0.603 | 0.872 |
| rs3129932 | 32106884 | 103.1 | 0.871 | 0.798 | 0.871 |
| rs2275855 | 29747547 | 100.2 | 0.871 | 0.791 | 0.871 |
| rs2516399 | 31540203 | 113.2 | 0.871 | 0.669 | 0.871 |
| rs2857210 | 32736533 | 100.2 | 0.871 | 0.644 | 0.871 |
| rs7357044 | 29387762 | 116.1 | 0.87 | 0.797 | 0.87 |
| rs592229 | 31701199 | 110.2 | 0.87 | 0.701 | 0.87 |
| rs2844773 | 29978253 | 100.2 | 0.87 | 0.527 | 0.87 |
| rs2523459 | 31136066 | 113.2 | 0.869 | 0.635 | 0.869 |
| rs2734962 | 29909184 | 100.2 | 0.868 | 0.843 | 0.868 |
| rs2894046 | 30842842 | 113.2 | 0.868 | 0.808 | 0.868 |
| rs15574 | 31745179 | 106.2 | 0.867 | 0.797 | 0.867 |
| rs6919855 | 32454751 | 116.1 | 0.867 | 0.73 | 0.867 |
| rs1362076 | 29211924 | 113.2 | 0.867 | 0.656 | 0.867 |
| rs740884 | 29637083 | 86.1 | 0.866 | 0.61 | 0.866 |
| rs6922512 | 32973202 | 116.1 | 0.864 | 0.827 | 0.864 |
| rs6926737 | 32401481 | 116.1 | 0.863 | 0.797 | 0.863 |
| rs2523747 | 29999696 | 100.2 | 0.863 | 0.779 | 0.863 |
| rs2023470 | 30177774 | 111.2 | 0.862 | 0.833 | 0.862 |
| rs2239839 | 33280776 | 116.2 | 0.861 | 0.764 | 0.861 |
| rs3131050 | 30530783 | 103.2 | 0.861 | 0.762 | 0.861 |
| rs2523984 | 29852761 | 100.2 | 0.861 | 0.372 | 0.861 |
| rs3132965 | 32166743 | 103.1 | 0.86 | 0.809 | 0.86 |
| rs3115537 | 31556562 | 103.2 | 0.859 | 0.453 | 0.859 |
| rs2647044 | 32438667 | 100.2 | 0.858 | 0.805 | 0.858 |
| rs1419640 | 29121609 | 88.1 | 0.858 | 0.749 | 0.858 |
| rs8283 | 31854057 | 108.2 | 0.857 | 0.807 | 0.857 |
| rs2517810 | 30009796 | 113.2 | 0.857 | 0.758 | 0.857 |
| rs2394694 | 29852570 | 100.2 | 0.856 | 0.814 | 0.856 |
| rs2076483 | 29342303 | 96.2 | 0.854 | 0.707 | 0.854 |
| rs411337 | 31848137 | 96.2 | 0.853 | 0.744 | 0.853 |
| rs6934993 | 29400086 | 116.1 | 0.853 | 0.72 | 0.853 |
| rs1245371 | 30099141 | 100.2 | 0.852 | 0.728 | 0.852 |
| rs6902723 | 32733527 | 116.1 | 0.85 | 0.754 | 0.85 |
| rs3134942 | 32188525 | 103.2 | 0.85 | 0.664 | 0.85 |
| rs454212 | 31993193 | 113.1 | 0.849 | 0.819 | 0.849 |
| rs1362126 | 29461777 | 113.2 | 0.849 | 0.483 | 0.849 |
| rs2075701 | 31707388 | 98.2 | 0.848 | 0.809 | 0.848 |
| rs3130502 | 31200498 | 103.2 | 0.846 | 0.564 | 0.846 |
| rs1057373 | 32806692 | 110.2 | 0.845 | 0.818 | 0.845 |
| rs1736936 | 29565075 | 110.2 | 0.845 | 0.798 | 0.845 |
| rs7763159 | 30128438 | 116.1 | 0.845 | 0.507 | 0.845 |
| rs2517755 | 29667417 | 111.2 | 0.845 | 0.433 | 0.845 |
| rs3131000 | 30862031 | 110.2 | 0.844 | 0.81 | 0.844 |
| rs1233384 | 29621747 | 111.2 | 0.844 | 0.762 | 0.844 |
| rs2239804 | 32182280 | 98.2 | 0.844 | 0.601 | 0.844 |
| rs3132668 | 29957922 | 103.2 | 0.842 | 0.81 | 0.842 |
| rs2074464 | 29470953 | 103.2 | 0.842 | 0.7 | 0.842 |
| rs2857107 | 32778930 | 100.2 | 0.842 | 0.56 | 0.842 |
| rs1362063 | 29430291 | 88.2 | 0.841 | 0.825 | 0.841 |
| rs1536215 | 28930465 | 113.2 | 0.841 | 0.76 | 0.841 |
| rs3135395 | 32175949 | 103.2 | 0.841 | 0.751 | 0.841 |
| rs3757328 | 30089146 | 107.2 | 0.841 | 0.733 | 0.841 |
| rs3130982 | 31144878 | 103.2 | 0.839 | 0.727 | 0.839 |
| rs2395269 | 32819295 | 111.2 | 0.838 | 0.838 | 0.838 |
| rs1264423 | 30632589 | 100.2 | 0.837 | 0.797 | 0.837 |
| rs2532929 | 30958573 | 100.2 | 0.837 | 0.769 | 0.837 |
| rs805303 | 31387124 | 100.2 | 0.837 | 0.726 | 0.837 |
| rs2260000 | 31652156 | 100.2 | 0.837 | 0.577 | 0.837 |
| rs86567 | 32970141 | 113.2 | 0.835 | 0.749 | 0.835 |
| rs3117328 | 29293130 | 103.2 | 0.833 | 0.745 | 0.833 |
| rs4711203 | 29950631 | 111.2 | 0.832 | 0.787 | 0.832 |
| rs2763982 | 31643309 | 111.2 | 0.832 | 0.758 | 0.832 |
| rs3130349 | 32167442 | 106.1 | 0.832 | 0.607 | 0.832 |
| rs2021365 | 29977821 | 94.1 | 0.831 | 0.597 | 0.831 |
| rs3117231 | 33067896 | 103.2 | 0.829 | 0.806 | 0.829 |
| rs2021719 | 30510611 | 113.2 | 0.828 | 0.76 | 0.828 |
| rs5009557 | 32550753 | 113.2 | 0.828 | 0.729 | 0.828 |
| rs1269556 | 30179545 | 100.2 | 0.828 | 0.646 | 0.828 |
| rs3131785 | 30962694 | 103.2 | 0.827 | 0.811 | 0.827 |
| rs362521 | 29619211 | 102.2 | 0.826 | 0.768 | 0.826 |
| rs644774 | 31609248 | 110.2 | 0.826 | 0.725 | 0.826 |
| rs558702 | 31641084 | 113.2 | 0.826 | 0.639 | 0.826 |
| rs3132571 | 30676071 | 113.1 | 0.826 | 0.625 | 0.826 |
| rs6932290 | 32486963 | 116 1 | 0.825 | 0.808 | 0.825 |
| rs429608 | 31701220 | 110.2 | 0.825 | 0.743 | 0.825 |
| rs2245738 | 31292526 | 111.2 | 0.824 | 0.818 | 0.824 |
| rs1633034 | 29514321 | 100.2 | 0.823 | 0.622 | 0.823 |
| rs2524179 | 30196910 | 100.2 | 0.823 | 0.434 | 0.823 |
| rs7776164 | 29021007 | 116.1 | 0.822 | 0.438 | 0.822 |
| rs3095226 | 31550767 | 103.2 | 0.821 | 0.585 | 0.821 |
| rs6457044 | 29835120 | 116.1 | 0.819 | 0.771 | 0.819 |
| rs362515 | 29340290 | 102.2 | 0.819 | 0.761 | 0.819 |
| rs3131934 | 30702602 | 103.2 | 0.818 | 0.751 | 0.818 |
| rs750332 | 31377808 | 102.2 | 0.818 | 0.668 | 0.818 |
| rs5009448 | 30000885 | 113.2 | 0.817 | 0.704 | 0.817 |
| rs2508024 | 30236270 | 100.2 | 0.816 | 0.8 | 0.816 |
| rs3130275 | 33333588 | 116.2 | 0.816 | 0.74 | 0.816 |
| rs3131115 | 30529524 | 103.1 | 0.816 | 0.67 | 0.816 |
| rs1131541 | 32432049 | 108.2 | 0.816 | 0.578 | 0.816 |
| rs7452206 | 31237046 | 116.1 | 0.816 | 0.181 | 0.816 |
| rs2074470 | 29456852 | 103.2 | 0.815 | 0.801 | 0.815 |
| rs7751953 | 33034798 | 116.1 | 0.815 | 0.788 | 0.815 |
| rs2073148 | 29200925 | 98.2 | 0.815 | 0.729 | 0.815 |
| rs885910 | 30619882 | 113.2 | 0.815 | 0.663 | 0.815 |
| rs3094179 | 29586329 | 103.2 | 0.815 | 0.617 | 0.815 |
| rs2301277 | 30773049 | 100.2 | 0.815 | 0.616 | 0.815 |
| rs2239885 | 30442007 | 98.2 | 0.814 | 0.625 | 0.814 |
| rs356963 | 30030521 | 110.2 | 0.813 | 0.743 | 0.813 |
| rs3132721 | 29904076 | 113.2 | 0.813 | 0.705 | 0.813 |
| rs928976 | 33042275 | 104.2 | 0.813 | 0.661 | 0.813 |
| rs3131784 | 30964747 | 103.2 | 0.812 | 0.709 | 0.812 |
| rs3097652 | 33059282 | 103.2 | 0.812 | 0.645 | 0.812 |
| rs805304 | 31756925 | 100.2 | 0.812 | 0.608 | 0.812 |
| rs5017401 | 31375850 | 113.2 | 0.811 | 0.337 | 0.811 |
| rs130067 | 31179324 | 100.2 | 0.81 | 0.746 | 0.81 |
| rs2530716 | 30748954 | 110.2 | 0.81 | 0.545 | 0.81 |
| rs635348 | 31673047 | 113.2 | 0.808 | 0.781 | 0.808 |
| rs464865 | 33258634 | 87.1 | 0.808 | 0.776 | 0.808 |
| rs2844688 | 30713042 | 100.2 | 0.808 | 0.769 | 0.808 |
| rs1632938 | 29567744 | 110.2 | 0.808 | 0.762 | 0.808 |
| rs565876 | 32720807 | 83.2 | 0.808 | 0.746 | 0.808 |
| rs6911246 | 29579052 | 116.1 | 0.808 | 0.583 | 0.808 |
| rs3093557 | 31606877 | 103.2 | 0.808 | 0.558 | 0.808 |
| rs2516672 | 30191144 | 113.2 | 0.807 | 0.679 | 0.807 |
| rs3095307 | 30862807 | 113.2 | 0.807 | 0.594 | 0.807 |
| rs3814959 | 30655945 | 107.2 | 0.806 | 0.66 | 0.806 |
| rs1611493 | 29948942 | 89.2 | 0.806 | 0.613 | 0.806 |
| rs1233492 | 29520905 | 100.2 | 0.806 | 0.561 | 0.806 |
| rs6456890 | 29077674 | 116.1 | 0.804 | 0.734 | 0.804 |
| rs2844680 | 30717254 | 110.1 | 0.804 | 0.436 | 0.804 |
| rs769177 | 31606292 | 111.2 | 0.803 | 0.8 | 0.803 |
| rs2844659 | 30595290 | 110.2 | 0.803 | 0.794 | 0.803 |
| rs2516698 | 30003132 | 100.2 | 0.803 | 0.752 | 0.803 |
| rs204890 | 31856355 | 113.2 | 0.802 | 0.78 | 0.802 |
| rs6457699 | 32983094 | 116.1 | 0.8 | 0.721 | 0.8 |
| rs2071787 | 28974897 | 96.2 | 0.8 | 0.652 | 0.8 |
| rs892666 | 29695486 | 110.2 | 0.798 | 0.781 | 0.798 |
| rs2517894 | 29863400 | 100.2 | 0.798 | 0.775 | 0.798 |
| rs1264348 | 30569231 | 111.2 | 0.798 | 0.716 | 0.798 |
| rs2394734 | 29817004 | 111.2 | 0.797 | 0.792 | 0.797 |
| rs3749950 | 31536261 | 107.2 | 0.797 | 0.635 | 0.797 |
| rs1264350 | 30567303 | 100.2 | 0.797 | 0.409 | 0.797 |
| rs2517407 | 30837226 | 100.2 | 0.796 | 0.769 | 0.796 |
| rs3117426 | 29334582 | 103.2 | 0.796 | 0.751 | 0.796 |
| rs3134767 | 30980618 | 113.2 | 0.796 | 0.287 | 0.796 |
| rs2535238 | 29707557 | 110.2 | 0.795 | 0.598 | 0.795 |
| rs805282 | 31430489 | 100.2 | 0.795 | 0.554 | 0.795 |
| rs401618 | 30010592 | 100.2 | 0.794 | 0.749 | 0.794 |
| rs550605 | 31677905 | 83.2 | 0.794 | 0.583 | 0.794 |
| rs2021722 | 30234862 | 113.2 | 0.792 | 0.776 | 0.792 |
| rs885950 | 31200980 | 113.2 | 0.791 | 0.791 | 0.791 |
| rs2516489 | 31546776 | 100.2 | 0.791 | 0.765 | 0.791 |
| rs2239842 | 33254570 | 103.2 | 0.791 | 0.752 | 0.791 |
| rs3117235 | 33066890 | 103.2 | 0.79 | 0.739 | 0.79 |
| rs446145 | 29291545 | 110.1 | 0.789 | 0.736 | 0.789 |
| rs2894260 | 32466535 | 101.2 | 0.789 | 0.675 | 0.789 |
| rs2143468 | 32079760 | 113.2 | 0.789 | 0.526 | 0.789 |
| rs3873260 | 29584440 | 113.2 | 0.788 | 0.402 | 0.788 |
| rs1050391 | 32911271 | 106.2 | 0.786 | 0.76 | 0.786 |
| rs3094001 | 31542773 | 113.2 | 0.786 | 0.597 | 0.786 |
| rs715044 | 29661663 | 113.2 | 0.786 | 0.296 | 0.786 |
| rs1610640 | 29821044 | 113.2 | 0.785 | 0.752 | 0.785 |
| rs887468 | 30912281 | 100.2 | 0.784 | 0.768 | 0.784 |
| rs755714 | 31380571 | 113.2 | 0.783 | 0.772 | 0.783 |
| rs1265777 | 32043915 | 87.2 | 0.783 | 0.477 | 0.783 |
| rs999265 | 29104351 | 113.2 | 0.783 | 0.41 | 0.783 |
| rs2021729 | 29200147 | 100.2 | 0.782 | 0.734 | 0.782 |
| rs7452076 | 32440830 | 116.1 | 0.781 | 0.757 | 0.781 |
| rs743399 | 31520562 | 86.2 | 0.78 | 0.62 | 0.78 |
| rs2256594 | 32206610 | 100.2 | 0.779 | 0.727 | 0.779 |
| rs1046080 | 31654562 | 106.2 | 0.779 | 0.65 | 0.779 |
| rs2523807 | 29910648 | 116.2 | 0.778 | 0.661 | 0.778 |
| rs3094647 | 29623391 | 103.2 | 0.776 | 0.668 | 0.776 |
| rs421446 | 33176230 | 80.2 | 0.776 | 0.646 | 0.776 |
| rs6415110 | 29708688 | 116.1 | 0.774 | 0.74 | 0.774 |
| rs2285805 | 30104026 | 100.2 | 0.773 | 0.64 | 0.773 |
| rs2242955 | 31533016 | 100.1 | 0.771 | 0.729 | 0.771 |
| rs29233 | 29381987 | 102.2 | 0.771 | 0.616 | 0.771 |
| rs4711312 | 32808072 | 111.2 | 0.77 | 0.428 | 0.77 |
| rs1264327 | 30621340 | 100.2 | 0.768 | 0.629 | 0.768 |
| rs2261033 | 31662272 | 111.1 | 0.767 | 0.712 | 0.767 |
| rs805288 | 31736712 | 100.2 | 0.766 | 0.757 | 0.766 |
| rs3106189 | 33283449 | 103.1 | 0.766 | 0.644 | 0.766 |
| rs2157338 | 32465081 | 113.2 | 0.766 | 0.643 | 0.766 |
| rs805299 | 31678336 | 100.1 | 0.766 | 0.635 | 0.766 |
| rs2074505 | 30581854 | 100.2 | 0.765 | 0.752 | 0.765 |
| rs1042338 | 29923547 | 100.2 | 0.765 | 0.706 | 0.765 |
| rs1059510 | 30518462 | 102.2 | 0.765 | 0.526 | 0.765 |
| rs4678 | 30954740 | 106.2 | 0.764 | 0.743 | 0.764 |
| rs396090 | 32970917 | 111.2 | 0.764 | 0.673 | 0.764 |
| rs1233419 | 29566951 | 100.2 | 0.764 | 0.42 | 0.764 |
| rs1265063 | 31138744 | 100.2 | 0.763 | 0.738 | 0.763 |
| rs3117223 | 33061511 | 103.2 | 0.763 | 0.728 | 0.763 |
| rs2269475 | 31642614 | 100.2 | 0.763 | 0.642 | 0.763 |
| rs2235499 | 33131411 | 98.2 | 0.763 | 0.592 | 0.763 |
| rs6457020 | 29776936 | 116.1 | 0.762 | 0.715 | 0.762 |
| rs185819 | 32076100 | 113.1 | 0.76 | 0.691 | 0.76 |
| rs2273611 | 31739063 | 100.2 | 0.759 | 0.689 | 0.759 |
| rs1632879 | 29978524 | 89.1 | 0.758 | 0.688 | 0.758 |
| rs3093551 | 31609316 | 103.2 | 0.757 | 0.686 | 0.757 |
| rs130072 | 31173304 | 78.2 | 0.757 | 0.522 | 0.757 |
| rs2295667 | 31688856 | 100.2 | 0.756 | 0.55 | 0.756 |
| rs2517466 | 30951047 | 113.2 | 0.753 | 0.747 | 0.753 |
| rs2844724 | 30529923 | 100.1 | 0.753 | 0.285 | 0.753 |
| rs7769073 | 31613471 | 116.1 | 0.751 | 0.434 | 0.751 |
| rs3130780 | 30645066 | 103.2 | 0.75 | 0.7 | 0.75 |
| rs4713354 | 30746135 | 111.2 | 0.747 | 0.734 | 0.747 |
| rs2021720 | 30509976 | 94.2 | 0.747 | 0.481 | 0.747 |
| rs6456879 | 29025153 | 116.1 | 0.747 | 0.466 | 0.747 |
| rs6913528 | 29710985 | 116.1 | 0.746 | 0.578 | 0.746 |
| rs6929434 | 31188789 | 116.1 | 0.746 | 0.502 | 0.746 |
| rs2074499 | 31300023 | 96.2 | 0.745 | 0.72 | 0.745 |
| rs518374 | 32285554 | 83.2 | 0.743 | 0.581 | 0.743 |
| rs446735 | 33247802 | 98.1 | 0.742 | 0.742 | 0.742 |
| rs2075799 | 31549287 | 98.2 | 0.741 | 0.432 | 0.741 |
| rs7757012 | 31169383 | 116.1 | 0.74 | 0.628 | 0.74 |
| rs3093984 | 31554098 | 103.1 | 0.739 | 0.691 | 0.739 |
| rs805258 | 31692396 | 100.2 | 0.737 | 0.719 | 0.737 |
| rs2071351 | 33036995 | 101.2 | 0.737 | 0.703 | 0.737 |
| rs6938130 | 32832766 | 116.1 | 0.737 | 0.596 | 0.737 |
| rs3130388 | 29958916 | 103.2 | 0.737 | 0.531 | 0.737 |
| rs1061815 | 29684132 | 106.2 | 0.736 | 0.667 | 0.736 |
| rs241455 | 32566776 | 102.2 | 0.734 | 0.599 | 0.734 |
| rs3891288 | 29141612 | 111.2 | 0.734 | 0.558 | 0.734 |
| rs1655938 | 29665973 | 111.2 | 0.733 | 0.693 | 0.733 |
| rs3131102 | 28954391 | 103.2 | 0.733 | 0.609 | 0.733 |
| rs6457566 | 32385481 | 116.1 | 0.731 | 0.729 | 0.731 |
| rs204887 | 31799983 | 111.2 | 0.731 | 0.228 | 0.731 |
| rs2844725 | 30235930 | 100.2 | 0.73 | 0.567 | 0.73 |
| rs2074491 | 31299204 | 98.2 | 0.729 | 0.648 | 0.729 |
| rs1233425 | 29566354 | 100.2 | 0.728 | 0.608 | 0.728 |
| rs4569 | 31696492 | 110.1 | 0.728 | 0.577 | 0.728 |
| rs2072109 | 30131031 | 98.2 | 0.728 | 0.515 | 0.728 |
| rs3130216 | 33070256 | 116.2 | 0.728 | 0.301 | 0.728 |
| rs3757340 | 30982850 | 107.1 | 0.724 | 0.684 | 0.724 |
| rs3116838 | 29140700 | 103.2 | 0.723 | 0.69 | 0.723 |
| rs7451419 | 32369487 | 116.1 | 0.72 | 0.667 | 0.72 |
| rs1475865 | 31428171 | 113.2 | 0.72 | 0.635 | 0.72 |
| rs1264315 | 30925871 | 113.1 | 0.72 | 0.605 | 0.72 |
| rs2269610 | 33282638 | 100.2 | 0.718 | 0.696 | 0.718 |
| rs3129012 | 29759400 | 103.2 | 0.718 | 0.416 | 0.718 |
| rs3132935 | 32190828 | 103.2 | 0.717 | 0.298 | 0.717 |
| rs2074473 | 30214943 | 98.2 | 0.715 | 0.693 | 0.715 |
| rs3130553 | 31143091 | 103.2 | 0.714 | 0.566 | 0.714 |
| rs2534672 | 31236316 | 110.2 | 0.713 | 0.67 | 0.713 |
| rs1573294 | 30447130 | 113.1 | 0.71 | 0.605 | 0.71 |
| rs7773534 | 29403950 | 116.1 | 0.71 | 0.495 | 0.71 |
| rs1737079 | 29495503 | 89.2 | 0.706 | 0.668 | 0.706 |
| rs805297 | 31681289 | 110.2 | 0.706 | 0.336 | 0.706 |
| rs805298 | 31679930 | 100.2 | 0.705 | 0.617 | 0.705 |
| rs3749951 | 31740262 | 107.2 | 0.703 | 0.631 | 0.703 |
| rs3094208 | 31151475 | 110.2 | 0.703 | 0.482 | 0.703 |
| rs805263 | 31686948 | 100.2 | 0.702 | 0.689 | 0.702 |
| rs3135330 | 32708806 | 103.2 | 0.701 | 0.542 | 0.701 |
| rs734181 | 33131655 | 111.2 | 0.7 | 0.454 | 0.7 |
| rs1050673 | 33163108 | 106.2 | 0.697 | 0.566 | 0.697 |
| rs3129948 | 32125401 | 103.2 | 0.696 | 0.1 | 0.696 |
| rs2517436 | 30714297 | 100.2 | 0.694 | 0.484 | 0.694 |
| rs2242664 | 31610089 | 103.2 | 0.693 | 0.632 | 0.693 |
| rs7761801 | 29744995 | 116.1 | 0.692 | 0.652 | 0.692 |
| rs2077022 | 32913091 | 103.2 | 0.692 | 0.495 | 0.692 |
| rs7743662 | 32450789 | 116.1 | 0.691 | 0.689 | 0.691 |
| rs1264319 | 30633181 | 100.2 | 0.69 | 0.383 | 0.69 |
| rs204990 | 31932187 | 110.1 | 0.689 | 0.635 | 0.689 |
| rs2736158 | 31658985 | 113.2 | 0.689 | 0.616 | 0.689 |
| rs13409 | 31192947 | 110.2 | 0.688 | 0.615 | 0.688 |
| rs3130057 | 31563314 | 103.2 | 0.684 | 0.61 | 0.684 |
| rs2857127 | 32778390 | 100.2 | 0.68 | 0.39 | 0.68 |
| rs7887 | 31923536 | 108.2 | 0.679 | 0.475 | 0.679 |
| rs2535277 | 31137570 | 100.2 | 0.678 | 0.621 | 0.678 |
| rs2395296 | 32913278 | 113.2 | 0.676 | 0.53 | 0.676 |
| rs2294883 | 32138208 | 111.2 | 0.675 | 0.55 | 0.675 |
| rs3129681 | 29422381 | 103.2 | 0.675 | 0.485 | 0.675 |
| rs3130141 | 30202935 | 103.1 | 0.673 | 0.667 | 0.673 |
| rs2285042 | 31955651 | 100.2 | 0.672 | 0.545 | 0.672 |
| rs5027663 | 30145898 | 113.2 | 0.671 | 0.384 | 0.671 |
| rs2294478 | 33091637 | 100.2 | 0.669 | 0.431 | 0.669 |
| rs6457710 | 33030884 | 116.1 | 0.668 | 0.498 | 0.668 |
| rs204900 | 32082610 | 100.2 | 0.667 | 0.635 | 0.667 |
| rs5018660 | 32468775 | 113.2 | 0.667 | 0.302 | 0.667 |
| rs6906587 | 29778731 | 116.1 | 0.665 | 0.657 | 0.665 |
| rs2242653 | 31446523 | 98.2 | 0.664 | 0.66 | 0.664 |
| rs444921 | 31702935 | 96.2 | 0.664 | 0.63 | 0.664 |
| rs2187820 | 32156630 | 103.2 | 0.664 | 0.457 | 0.664 |
| rs2071281 | 32215023 | 98.2 | 0.663 | 0.554 | 0.663 |
| rs3116820 | 29214223 | 103.2 | 0.663 | 0.502 | 0.663 |
| rs241407 | 32633497 | 110.2 | 0.662 | 0.62 | 0.662 |
| rs6457443 | 31539301 | 116.1 | 0.662 | 0.536 | 0.662 |
| rs668558 | 31856575 | 86.2 | 0.662 | 0.449 | 0.662 |
| rs2516675 | 30201278 | 111.2 | 0.655 | 0.558 | 0.655 |
| rs909726 | 29490749 | 113.2 | 0.648 | 0.384 | 0.648 |
| rs4642463 | 32723349 | 111.2 | 0.647 | 0.607 | 0.647 |
| rs3020644 | 31665384 | 101.1 | 0.647 | 0.508 | 0.647 |
| rs2280801 | 31650902 | 100.2 | 0.647 | 0.488 | 0.647 |
| rs1736976 | 29836570 | 89.2 | 0.646 | 0.484 | 0.646 |
| rs1362065 | 29428675 | 88.2 | 0.645 | 0.615 | 0.645 |
| rs3094188 | 30913003 | 103.2 | 0.645 | 0.559 | 0.645 |
| rs7764777 | 29822668 | 116.1 | 0.641 | 0.179 | 0.641 |
| rs4959117 | 32616391 | 111.2 | 0.639 | 0.566 | 0.639 |
| rs2844621 | 31300845 | 100.2 | 0.639 | 0.349 | 0.639 |
| rs3099840 | 31201479 | 103.2 | 0.638 | 0.588 | 0.638 |
| rs2073525 | 33283528 | 103.2 | 0.634 | 0.479 | 0.634 |
| rs3094693 | 30189724 | 103.1 | 0.631 | 0.582 | 0.631 |
| rs7759272 | 29747502 | 116.1 | 0.624 | 0.506 | 0.624 |
| rs6911350 | 29336182 | 116.1 | 0.624 | 0.194 | 0.624 |
| rs2070600 | 31922200 | 98.1 | 0.621 | 0.616 | 0.621 |
| rs2269428 | 31800957 | 100.2 | 0.621 | 0.601 | 0.621 |
| rs2302399 | 31151972 | 111.2 | 0.619 | 0.59 | 0.619 |
| rs1633098 | 29475786 | 110.2 | 0.618 | 0.469 | 0.618 |
| rs555007 | 31621090 | 98.2 | 0.617 | 0.537 | 0.617 |
| rs2508042 | 29659075 | 100.2 | 0.617 | 0.487 | 0.617 |
| rs3130653 | 30593529 | 113.2 | 0.615 | 0.518 | 0.615 |
| rs1705003 | 33387405 | 89.1 | 0.614 | 0.595 | 0.614 |
| rs764554 | 30439273 | 111.2 | 0.611 | 0.226 | 0.611 |
| rs2532942 | 30953121 | 111.1 | 0.61 | 0.5 | 0.61 |
| rs213207 | 33242617 | 87.2 | 0.61 | 0.365 | 0.61 |
| rs2428494 | 31380949 | 110.2 | 0.608 | 0.353 | 0.608 |
| rs1799910 | 33132050 | 100.1 | 0.606 | 0.543 | 0.606 |
| rs2071480 | 32823380 | 110.2 | 0.605 | 0.291 | 0.605 |
| rs1079687 | 30379031 | 113.2 | 0.604 | 0.579 | 0.604 |
| rs970902 | 33134111 | 111.2 | 0.601 | 0.59 | 0.601 |
| rs6900438 | 33370660 | 116.1 | 0.601 | 0.414 | 0.601 |
| rs213213 | 33176445 | 87.2 | 0.599 | 0.494 | 0.599 |
| rs410909 | 30009548 | 101.1 | 0.592 | 0.379 | 0.592 |
| rs1052486 | 31669523 | 113.2 | 0.573 | 0.534 | 0.573 |
| rs1150736 | 30104120 | 100.2 | 0.546 | 0.473 | 0.546 |
| rs130076 | 31183305 | 106.2 | 0.525 | 0.492 | 0.525 |
| rs2395174 | 32430660 | 113.2 | 0.467 | 0.175 | 0.467 |
| rs2252223 | 31142279 | 100.2 | 0.403 | 0.299 | 0.403 |
| rs1264303 | 30943321 | 106.2 | 0.994 | 0.674 | 0.994 |
| rs2240061 | 31178673 | 98.2 | 0.993 | 0.679 | 0.993 |
| rs1345229 | 29953153 | 111.2 | 0.99 | 0.681 | 0.99 |
| rs2395185 | 32452654 | 111.2 | 0.99 | 0.645 | 0.99 |
| rs3130283 | 32158291 | 103.1 | 0.987 | 0.8 | 0.987 |
| rs2257914 | 30181335 | 100.2 | 0.984 | 0.643 | 0.984 |
| rs916920 | 30938010 | 113.1 | 0.984 | 0.597 | 0.984 |
| rs2249059 | 30717125 | 103.2 | 0.98 | 0.696 | 0.98 |
| rs2267640 | 30351651 | 100.2 | 0.975 | 0.88 | 0.975 |
| rs1150765 | 31188404 | 100.2 | 0.975 | 0.741 | 0.975 |
| rs3749967 | 32054601 | 107.2 | 0.973 | 0.832 | 0.973 |
| rs3817963 | 32138844 | 107.2 | 0.972 | 0.752 | 0.972 |
| rs2051549 | 32724874 | 94.2 | 0.972 | 0.654 | 0.972 |
| rs1894408 | 32780248 | 113.2 | 0.97 | 0.886 | 0.97 |
| rs3130315 | 31991442 | 111.2 | 0.969 | 0.839 | 0.969 |
| rs761187 | 32088793 | 113.2 | 0.969 | 0.797 | 0.969 |
| rs3749966 | 32032264 | 107.2 | 0.969 | 0.714 | 0.969 |
| rs2395153 | 32365104 | 113.2 | 0.968 | 0.743 | 0.968 |
| rs1150735 | 30105988 | 100.2 | 0.968 | 0.67 | 0.968 |
| rs7843 | 29923125 | 106.2 | 0.968 | 0.567 | 0.968 |
| rs2074478 | 31166460 | 103.2 | 0.967 | 0.866 | 0.967 |
| rs204993 | 31926338 | 96.1 | 0.967 | 0.836 | 0.967 |
| rs2301271 | 32719981 | 100.2 | 0.965 | 0.812 | 0.965 |
| rs2284168 | 30233395 | 100.2 | 0.961 | 0.738 | 0.961 |
| rs11244 | 32551481 | 106.2 | 0.955 | 0.838 | 0.955 |
| rs1264583 | 30354186 | 100.2 | 0.954 | 0.867 | 0.954 |
| rs2074474 | 30370583 | 98.2 | 0.953 | 0.602 | 0.953 |
| rs2213571 | 32714725 | 113.2 | 0.944 | 0.888 | 0.944 |
| rs204991 | 31932123 | 110.1 | 0.943 | 0.824 | 0.943 |
| rs3129881 | 32180241 | 103.2 | 0.943 | 0.784 | 0.943 |
| rs1049623 | 30925642 | 110.1 | 0.929 | 0.772 | 0.929 |
| rs974962 | 30085365 | 113.2 | 0.921 | 0.52 | 0.921 |
| rs8512 | 30772491 | 111.2 | 0.919 | 0.834 | 0.919 |
| rs2071287 | 32190187 | 103.2 | 0.916 | 0.794 | 0.916 |
| rs1058318 | 30572879 | 106.2 | 0.91 | 0.811 | 0.91 |
| rs2269702 | 30445893 | 100.2 | 0.888 | 0.823 | 0.888 |
| rs2286404 | 30034021 | 113.2 | 0.862 | 0.724 | 0.862 |
| rs2269707 | 30705253 | 100.2 | 0.836 | 0.784 | 0.836 |
| rs2269424 | 32158239 | 100.2 | 0.813 | 0.77 | 0.813 |
| rs2040409 | 32608472 | 94.2 | 0.987 | 0.584 | 0.987 |
| rs241424 | 32806454 | 100.2 | 0.984 | 0.846 | 0.984 |
| rs2854275 | 32622585 | 100.2 | 0.982 | 0.75 | 0.982 |
| rs3880457 | 31690977 | 113.1 | 0.964 | 0.667 | 0.964 |
| rs4711206 | 29757942 | 111.2 | 0.999 | 0.728 | 0.999 |
| rs1233495 | 29214876 | 100.2 | 0.999 | 0.629 | 0.999 |
| rs3130055 | 31556298 | 103.2 | 0.997 | 0.841 | 0.997 |
| rs2071593 | 31571678 | 96.2 | 0.997 | 0.774 | 0.997 |
| rs7758397 | 32489119 | 116.1 | 0.997 | 0.727 | 0.997 |
| rs3130453 | 31188667 | 106.2 | 0.997 | 0.653 | 0.997 |
| rs2242657 | 31661170 | 98.2 | 0.996 | 0.68 | 0.996 |
| rs3130605 | 32978678 | 111.2 | 0.996 | 0.629 | 0.996 |
| rs3093559 | 31606473 | 103.2 | 0.995 | 0.802 | 0.995 |
| rs2235498 | 33131877 | 98.2 | 0.995 | 0.8 | 0.995 |
| rs3135034 | 32722419 | 103.2 | 0.995 | 0.701 | 0.995 |
| rs3129952 | 32385521 | 103.2 | 0.995 | 0.689 | 0.995 |
| rs6457602 | 32549256 | 116.1 | 0.995 | 0.669 | 0.995 |
| rs2523451 | 31139909 | 113.2 | 0.995 | 0.668 | 0.995 |
| rs497239 | 31679519 | 100.2 | 0.994 | 0.73 | 0.994 |
| rs4959050 | 30187589 | 111.2 | 0.994 | 0.715 | 0.994 |
| rs714289 | 32899220 | 113.2 | 0.994 | 0.668 | 0.994 |
| rs447250 | 32982668 | 80.2 | 0.994 | 0.576 | 0.994 |
| rs2844775 | 29950180 | 100.2 | 0.993 | 0.689 | 0.993 |
| rs3135002 | 32439196 | 108.2 | 0.993 | 0.645 | 0.993 |
| rs3077 | 33034469 | 86.2 | 0.993 | 0.644 | 0.993 |
| rs3094205 | 30862620 | 110.2 | 0.993 | 0.634 | 0.993 |
| rs6927088 | 32045753 | 116.1 | 0.992 | 0.805 | 0.992 |
| rs2857174 | 32525525 | 100.2 | 0.992 | 0.794 | 0.992 |
| rs181997 | 32902199 | 92.1 | 0.992 | 0.761 | 0.992 |
| rs261950 | 30040319 | 89.2 | 0.992 | 0.716 | 0.992 |
| rs3117329 | 29290196 | 103.2 | 0.992 | 0.689 | 0.992 |
| rs3128931 | 32973155 | 103.2 | 0.992 | 0.688 | 0.992 |
| rs6904456 | 29459977 | 116.1 | 0.991 | 0.777 | 0.991 |
| rs4713216 | 29426584 | 111.2 | 0.991 | 0.735 | 0.991 |
| rs3097671 | 33040676 | 108.2 | 0.99 | 0.754 | 0.99 |
| rs3135368 | 32158035 | 103.2 | 0.989 | 0.742 | 0.989 |
| rs1264323 | 30626665 | 100.2 | 0.989 | 0.622 | 0.989 |
| rs3094073 | 30001982 | 103.2 | 0.988 | 0.808 | 0.988 |
| rs2523995 | 30163382 | 100.2 | 0.988 | 0.666 | 0.988 |
| rs3131635 | 31534870 | 103.2 | 0.987 | 0.82 | 0.987 |
| rs1610724 | 29826673 | 89.2 | 0.987 | 0.793 | 0.987 |
| rs4713337 | 30590589 | 111.2 | 0.987 | 0.734 | 0.987 |
| rs2855442 | 33130126 | 108.2 | 0.987 | 0.725 | 0.987 |
| rs885915 | 29973473 | 100.2 | 0.987 | 0.721 | 0.987 |
| rs241440 | 32568118 | 110.2 | 0.986 | 0.834 | 0.986 |
| rs879882 | 30910210 | 103.1 | 0.986 | 0.747 | 0.986 |
| rs6937061 | 33081259 | 116.1 | 0.986 | 0.73 | 0.986 |
| rs2023372 | 30142776 | 94.2 | 0.986 | 0.713 | 0.986 |
| rs1610601 | 29470941 | 89.2 | 0.986 | 0.644 | 0.986 |
| rs29228 | 29686182 | 103.2 | 0.985 | 0.662 | 0.985 |
| rs7454372 | 29496723 | 116.1 | 0.985 | 0.6 | 0.985 |
| rs707937 | 31789665 | 100.2 | 0.985 | 0.571 | 0.985 |
| rs7341251 | 30976303 | 116.1 | 0.984 | 0.815 | 0.984 |
| rs1800750 | 31601644 | 113.2 | 0.984 | 0.773 | 0.984 |
| rs2394518 | 29137277 | 113.2 | 0.984 | 0.721 | 0.984 |
| rs2301225 | 33037307 | 100.2 | 0.984 | 0.705 | 0.984 |
| rs1264459 | 30516651 | 110.2 | 0.983 | 0.88 | 0.983 |
| rs7773955 | 32708285 | 116.1 | 0.983 | 0.766 | 0.983 |
| rs15912 | 32937519 | 103.2 | 0.983 | 0.702 | 0.983 |
| rs1419675 | 29863465 | 100.1 | 0.983 | 0.645 | 0.983 |
| rs7450074 | 29199772 | 116.1 | 0.982 | 0.754 | 0.982 |
| rs437179 | 31699772 | 98.2 | 0.982 | 0.733 | 0.982 |
| rs3132486 | 31305485 | 103.2 | 0.982 | 0.605 | 0.982 |
| rs2071286 | 31950653 | 111.2 | 0.982 | 0.594 | 0.982 |
| rs2395029 | 31202538 | 100.2 | 0.981 | 0.866 | 0.981 |
| rs7765791 | 29472518 | 116.1 | 0.981 | 0.863 | 0.981 |
| rs3094576 | 29578695 | 103.2 | 0.981 | 0.71 | 0.981 |
| rs3819269 | 31149774 | 107.2 | 0.981 | 0.706 | 0.981 |
| rs2074471 | 30217980 | 98.1 | 0.981 | 0.702 | 0.981 |
| rs6929716 | 32778676 | 116.1 | 0.981 | 0.685 | 0.981 |
| rs2523608 | 31384313 | 110.2 | 0.981 | 0.675 | 0.981 |
| rs1264540 | 30448606 | 100.1 | 0.981 | 0.646 | 0.981 |
| rs3116996 | 33090635 | 103.2 | 0.981 | 0.622 | 0.981 |
| rs3130933 | 31192892 | 110.2 | 0.981 | 0.578 | 0.981 |
| rs6940867 | 31136181 | 116.1 | 0.98 | 0.696 | 0.98 |
| rs2535250 | 29405175 | 100.2 | 0.979 | 0.773 | 0.979 |
| rs6903608 | 32454025 | 116.1 | 0.979 | 0.763 | 0.979 |
| rs3117435 | 29380746 | 103.2 | 0.979 | 0.663 | 0.979 |
| rs1264425 | 30629379 | 100.2 | 0.979 | 0.567 | 0.979 |
| rs3873342 | 30728524 | 113.2 | 0.978 | 0.674 | 0.978 |
| rs1265059 | 31139301 | 100.2 | 0.977 | 0.847 | 0.977 |
| rs6911634 | 30086079 | 116.1 | 0.977 | 0.683 | 0.977 |
| rs464921 | 33233201 | 87.2 | 0.977 | 0.661 | 0.977 |
| rs4713221 | 29138497 | 111.2 | 0.977 | 0.54 | 0.977 |
| rs362544 | 29568144 | 113.2 | 0.976 | 0.852 | 0.976 |
| rs3130977 | 31142795 | 110.2 | 0.976 | 0.787 | 0.976 |
| rs2395352 | 33102179 | 100.2 | 0.976 | 0.715 | 0.976 |
| rs984802 | 30092119 | 113.2 | 0.976 | 0.693 | 0.976 |
| rs1049633 | 30928692 | 106.2 | 0.976 | 0.688 | 0.976 |
| rs6923005 | 29038620 | 116.1 | 0.975 | 0.783 | 0.975 |
| rs2001181 | 31299318 | 113.2 | 0.975 | 0.68 | 0.975 |
| rs2071541 | 32806271 | 110.2 | 0.974 | 0.842 | 0.974 |
| rs3807039 | 31849130 | 107.1 | 0.974 | 0.784 | 0.974 |
| rs6918223 | 32724098 | 116.1 | 0.973 | 0.809 | 0.973 |
| rs3130501 | 31200285 | 103.1 | 0.973 | 0.764 | 0.973 |
| rs3869092 | 30705209 | 113.1 | 0.973 | 0.746 | 0.973 |
| rs1736920 | 29567931 | 110.2 | 0.972 | 0.87 | 0.972 |
| rs3823418 | 31161768 | 107.2 | 0.972 | 0.87 | 0.972 |
| rs2844802 | 30009192 | 113.1 | 0.972 | 0.865 | 0.972 |
| rs2394412 | 30842972 | 113.2 | 0.972 | 0.753 | 0.972 |
| rs439844 | 31843697 | 80.1 | 0.971 | 0.769 | 0.971 |
| rs3763309 | 32146730 | 107.2 | 0.971 | 0.669 | 0.971 |
| rs7383312 | 31527437 | 116.1 | 0.97 | 0.865 | 0.97 |
| rs1633021 | 29517627 | 89.2 | 0.97 | 0.863 | 0.97 |
| rs1367727 | 32935891 | 103.2 | 0.97 | 0.666 | 0.97 |
| rs2269423 | 32171709 | 103.1 | 0.969 | 0.79 | 0.969 |
| rs29269 | 29388505 | 113.2 | 0.969 | 0.777 | 0.969 |
| rs2894054 | 30643032 | 110.1 | 0.969 | 0.774 | 0.969 |
| rs2534674 | 31235861 | 110.2 | 0.969 | 0.717 | 0.969 |
| rs6915177 | 29585044 | 116.1 | 0.969 | 0.712 | 0.969 |
| rs4713559 | 32610062 | 111.2 | 0.969 | 0.607 | 0.969 |
| rs7382836 | 32735881 | 116.1 | 0.968 | 0.873 | 0.968 |
| rs4071986 | 30190589 | 113.1 | 0.968 | 0.836 | 0.968 |
| rs735883 | 32809467 | 113.1 | 0.968 | 0.789 | 0.968 |
| rs3793127 | 32142672 | 107.1 | 0.968 | 0.781 | 0.968 |
| rs2301269 | 32914840 | 100.2 | 0.968 | 0.751 | 0.968 |
| rs2844685 | 30713841 | 100.2 | 0.967 | 0.768 | 0.967 |
| rs6908943 | 32636268 | 116.1 | 0.967 | 0.731 | 0.967 |
| rs7383578 | 29834966 | 116.1 | 0.967 | 0.689 | 0.967 |
| rs1633088 | 29776103 | 98.2 | 0.967 | 0.587 | 0.967 |
| rs3871247 | 30916460 | 113.2 | 0.966 | 0.82 | 0.966 |
| rs461338 | 33219628 | 106.2 | 0.966 | 0.807 | 0.966 |
| rs3807031 | 30094673 | 111.2 | 0.965 | 0.781 | 0.965 |
| rs6911709 | 29566381 | 116.1 | 0.965 | 0.77 | 0.965 |
| rs2524005 | 29960037 | 100.2 | 0.965 | 0.766 | 0.965 |
| rs1736991 | 29829497 | 89.2 | 0.964 | 0.648 | 0.964 |
| rs4713422 | 30770660 | 111.2 | 0.963 | 0.786 | 0.963 |
| rs6921921 | 29817970 | 116.1 | 0.963 | 0.73 | 0.963 |
| rs7453137 | 28930305 | 116.1 | 0.963 | 0.713 | 0.963 |
| rs1801823 | 33261030 | 89.2 | 0.963 | 0.657 | 0.963 |
| rs498240 | 31663350 | 110.1 | 0.962 | 0.906 | 0.962 |
| rs6906730 | 32405178 | 116.1 | 0.962 | 0.877 | 0.962 |
| rs2057726 | 30106108 | 113.2 | 0.962 | 0.849 | 0.962 |
| rs2523989 | 30139461 | 100.2 | 0.962 | 0.804 | 0.962 |
| rs2071788 | 28974859 | 96.2 | 0.962 | 0.776 | 0.962 |
| rs4713214 | 29425994 | 111.2 | 0.961 | 0.794 | 0.961 |
| rs29273 | 29381747 | 102.2 | 0.961 | 0.75 | 0.961 |
| rs2517912 | 29454702 | 111.2 | 0.961 | 0.455 | 0.961 |
| rs1265156 | 30913055 | 100.2 | 0.96 | 0.6 | 0.96 |
| rs4386816 | 31306426 | 111.2 | 0.96 | 0.563 | 0.96 |
| rs2075702 | 31708269 | 98.1 | 0.959 | 0.805 | 0.959 |
| rs1264616 | 30035065 | 113.2 | 0.959 | 0.78 | 0.959 |
| rs1419633 | 29143968 | 113.2 | 0.959 | 0.773 | 0.959 |
| rs389883 | 31718218 | 100.2 | 0.959 | 0.721 | 0.959 |
| rs2523921 | 30745848 | 100.1 | 0.958 | 0.895 | 0.958 |
| rs209474 | 32917999 | 113.2 | 0.958 | 0.89 | 0.958 |
| rs2532921 | 30693328 | 100.1 | 0.958 | 0.753 | 0.958 |
| rs2207338 | 28970579 | 113.2 | 0.958 | 0.729 | 0.958 |
| rs2844829 | 29580140 | 113.2 | 0.958 | 0.666 | 0.958 |
| rs1035798 | 31921979 | 113.1 | 0.958 | 0.633 | 0.958 |
| rs2857597 | 31643683 | 100.2 | 0.957 | 0.775 | 0.957 |
| rs2747421 | 29707637 | 110.2 | 0.957 | 0.748 | 0.957 |
| rs2246618 | 31537720 | 100.2 | 0.957 | 0.668 | 0.957 |
| rs2855812 | 31531624 | 111.2 | 0.957 | 0.619 | 0.957 |
| rs6457259 | 30727325 | 116.1 | 0.956 | 0.918 | 0.956 |
| rs2071799 | 32484932 | 98.2 | 0.956 | 0.855 | 0.956 |
| rs7754054 | 29454928 | 116.1 | 0.956 | 0.838 | 0.956 |
| rs1049526 | 32719561 | 106.2 | 0.956 | 0.837 | 0.956 |
| rs2284191 | 32970036 | 110.2 | 0.956 | 0.72 | 0.956 |
| rs1655944 | 29659154 | 89.2 | 0.956 | 0.716 | 0.956 |
| rs7451258 | 31235410 | 116.1 | 0.956 | 0.543 | 0.956 |
| rs2844665 | 30777613 | 100.2 | 0.955 | 0.764 | 0.955 |
| rs3763364 | 32809041 | 107.2 | 0.955 | 0.523 | 0.955 |
| rs3128982 | 31187949 | 103.2 | 0.954 | 0.785 | 0.954 |
| rs6457358 | 31299307 | 116.1 | 0.954 | 0.773 | 0.954 |
| rs7758512 | 30030989 | 116.1 | 0.954 | 0.771 | 0.954 |
| rs3115673 | 31868723 | 103.2 | 0.954 | 0.72 | 0.954 |
| rs7029 | 31688637 | 106.2 | 0.954 | 0.661 | 0.954 |
| rs1041885 | 32432292 | 113.2 | 0.954 | 0.594 | 0.954 |
| rs259939 | 29782339 | 110.2 | 0.953 | 0.787 | 0.953 |
| rs3093993 | 31549468 | 103.2 | 0.953 | 0.645 | 0.953 |
| rs6457595 | 32469792 | 116.1 | 0.952 | 0.896 | 0.952 |
| rs3128844 | 29521688 | 103.2 | 0.952 | 0.742 | 0.952 |
| rs3094212 | 31149536 | 110.2 | 0.952 | 0.72 | 0.952 |
| rs1264695 | 30129079 | 100.2 | 0.952 | 0.559 | 0.952 |
| rs2516393 | 31565471 | 110.2 | 0.951 | 0.908 | 0.951 |
| rs209146 | 28930948 | 92.2 | 0.951 | 0.878 | 0.951 |
| rs4713243 | 29491719 | 111.2 | 0.95 | 0.742 | 0.95 |
| rs532385 | 32215098 | 83.2 | 0.949 | 0.516 | 0.949 |
| rs1610628 | 29498967 | 89.2 | 0.948 | 0.898 | 0.948 |
| rs8111 | 31853932 | 108.2 | 0.948 | 0.798 | 0.948 |
| rs2242660 | 31656433 | 100.2 | 0.948 | 0.787 | 0.948 |
| rs3115592 | 29923350 | 103.2 | 0.948 | 0.742 | 0.948 |
| rs3135029 | 32915188 | 103.2 | 0.948 | 0.449 | 0.948 |
| rs3869109 | 30954954 | 111.2 | 0.947 | 0.876 | 0.947 |
| rs2066951 | 29516917 | 113.1 | 0.947 | 0.793 | 0.947 |
| rs2282851 | 33281756 | 103.2 | 0.947 | 0.777 | 0.947 |
| rs2517713 | 29978499 | 100.1 | 0.947 | 0.641 | 0.947 |
| rs7770505 | 30089707 | 116.1 | 0.945 | 0.722 | 0.945 |
| rs3117294 | 29424087 | 103.2 | 0.945 | 0.662 | 0.945 |
| rs2857218 | 32626097 | 100.2 | 0.944 | 0.837 | 0.944 |
| rs2242656 | 31384860 | 100.2 | 0.943 | 0.891 | 0.943 |
| rs2275854 | 29747596 | 113.2 | 0.943 | 0.871 | 0.943 |
| rs3130050 | 31677600 | 103.2 | 0.943 | 0.798 | 0.943 |
| rs7745413 | 29975869 | 116.1 | 0.943 | 0.771 | 0.943 |
| rs2894066 | 28956479 | 111.2 | 0.943 | 0.55 | 0.943 |
| rs3213469 | 31859611 | 106.2 | 0.942 | 0.746 | 0.942 |
| rs406936 | 31991915 | 101.1 | 0.942 | 0.661 | 0.942 |
| rs3916765 | 32456307 | 108.2 | 0.94 | 0.805 | 0.94 |
| rs3873257 | 29584167 | 113.2 | 0.938 | 0.902 | 0.938 |
| rs453658 | 29290606 | 111.2 | 0.938 | 0.785 | 0.938 |
| rs660594 | 31608008 | 110.1 | 0.937 | 0.914 | 0.937 |
| rs1008403 | 29903585 | 86.2 | 0.937 | 0.734 | 0.937 |
| rs763009 | 28977660 | 113.2 | 0.936 | 0.931 | 0.936 |
| rs3130649 | 30574012 | 110.1 | 0.936 | 0.864 | 0.936 |
| rs7752270 | 29116542 | 116.1 | 0.936 | 0.817 | 0.936 |
| rs659445 | 31923123 | 110.2 | 0.936 | 0.776 | 0.936 |
| rs7753474 | 29403894 | 116.1 | 0.935 | 0.858 | 0.935 |
| rs3130762 | 29140336 | 103.2 | 0.934 | 0.84 | 0.934 |
| rs3094127 | 30758579 | 103.1 | 0.934 | 0.754 | 0.934 |
| rs7754598 | 30528428 | 116.1 | 0.933 | 0.823 | 0.933 |
| rs7774255 | 29336926 | 116.1 | 0.933 | 0.782 | 0.933 |
| rs465506 | 33360460 | 80.2 | 0.933 | 0.695 | 0.933 |
| rs2853961 | 31291281 | 100.2 | 0.933 | 0.484 | 0.933 |
| rs3815101 | 30575923 | 107.2 | 0.931 | 0.7 | 0.931 |
| rs2517892 | 29864045 | 100.2 | 0.93 | 0.649 | 0.93 |
| rs2187689 | 32623404 | 113.2 | 0.929 | 0.895 | 0.929 |
| rs6901092 | 33090422 | 116.1 | 0.929 | 0.894 | 0.929 |
| rs2857605 | 31295609 | 100.2 | 0.929 | 0.868 | 0.929 |
| rs2516676 | 30201240 | 100.2 | 0.928 | 0.808 | 0.928 |
| rs6922756 | 31225239 | 116.1 | 0.926 | 0.901 | 0.926 |
| rs2074475 | 29908648 | 96.1 | 0.926 | 0.584 | 0.926 |
| rs1264432 | 30623138 | 101.2 | 0.924 | 0.71 | 0.924 |
| rs2267633 | 29341599 | 102.2 | 0.922 | 0.878 | 0.922 |
| rs2517819 | 29919494 | 100.2 | 0.922 | 0.735 | 0.922 |
| rs3130637 | 31546883 | 103.2 | 0.917 | 0.889 | 0.917 |
| rs3116837 | 28955415 | 103.2 | 0.917 | 0.679 | 0.917 |
| rs3793125 | 31737688 | 107.2 | 0.916 | 0.776 | 0.916 |
| rs757257 | 29913216 | 108.2 | 0.911 | 0.707 | 0.911 |
| rs3117038 | 33078904 | 103.2 | 0.909 | 0.793 | 0.909 |
| rs2523589 | 31386083 | 100.2 | 0.905 | 0.805 | 0.905 |
| rs2747479 | 33338901 | 111.2 | 0.905 | 0.698 | 0.905 |
| rs3130244 | 30614055 | 103.1 | 0.903 | 0.77 | 0.903 |
| rs7357041 | 29387670 | 116.1 | 0.902 | 0.88 | 0.902 |
| rs4713504 | 31870967 | 111.2 | 0.902 | 0.788 | 0.902 |
| rs2187580 | 33180406 | 96.2 | 0.901 | 0.781 | 0.901 |
| rs3132945 | 32009437 | 103.2 | 0.899 | 0.834 | 0.899 |
| rs3998751 | 29855059 | 108.2 | 0.898 | 0.781 | 0.898 |
| rs2860580 | 29967091 | 101.2 | 0.898 | 0.75 | 0.898 |
| rs7757916 | 32567554 | 116.1 | 0.897 | 0.446 | 0.897 |
| rs3130014 | 33305001 | 103.2 | 0.896 | 0.867 | 0.896 |
| rs3830076 | 31867001 | 107.1 | 0.894 | 0.882 | 0.894 |
| rs2158280 | 29120082 | 110.2 | 0.893 | 0.775 | 0.893 |
| rs1233391 | 29618492 | 100.1 | 0.892 | 0.782 | 0.892 |
| rs2844477 | 31637455 | 100.2 | 0.891 | 0.463 | 0.891 |
| rs7453097 | 31593947 | 116.1 | 0.89 | 0.499 | 0.89 |
| rs3130816 | 28974666 | 103.2 | 0.889 | 0.888 | 0.889 |
| rs4151648 | 31683833 | 110.1 | 0.889 | 0.445 | 0.889 |
| rs3131090 | 29140226 | 103.2 | 0.888 | 0.851 | 0.888 |
| rs1063318 | 32403502 | 106.2 | 0.886 | 0.371 | 0.886 |
| rs3130660 | 30767083 | 103.2 | 0.883 | 0.878 | 0.883 |
| rs1264549 | 30438574 | 100.2 | 0.881 | 0.746 | 0.881 |
| rs2299851 | 31489360 | 100.2 | 0.881 | 0.724 | 0.881 |
| rs2844682 | 30716906 | 111.1 | 0.88 | 0.865 | 0.88 |
| rs2051625 | 33279884 | 94.2 | 0.879 | 0.805 | 0.879 |
| rs2178899 | 31377514 | 113.2 | 0.879 | 0.801 | 0.879 |
| rs3130389 | 29958957 | 103.2 | 0.875 | 0.641 | 0.875 |
| rs3749981 | 32633439 | 107.2 | 0.874 | 0.5 | 0.874 |
| rs1233386 | 29620642 | 100.2 | 0.869 | 0.824 | 0.869 |
| rs2142234 | 31697814 | 110.2 | 0.865 | 0.748 | 0.865 |
| rs2747419 | 29710061 | 100.2 | 0.864 | 0.837 | 0.864 |
| rs356971 | 29750555 | 92.2 | 0.863 | 0.855 | 0.863 |
| rs1079541 | 30177514 | 113.2 | 0.863 | 0.669 | 0.863 |
| rs2273192 | 29408937 | 100.2 | 0.862 | 0.732 | 0.862 |
| rs1015466 | 29856674 | 100.2 | 0.862 | 0.464 | 0.862 |
| rs4947324 | 31298888 | 111.2 | 0.858 | 0.785 | 0.858 |
| rs2071295 | 31809457 | 98.2 | 0.852 | 0.734 | 0.852 |
| rs3130010 | 33311264 | 103.2 | 0.847 | 0.799 | 0.847 |
| rs2517424 | 30720754 | 100.2 | 0.845 | 0.745 | 0.845 |
| rs3093986 | 31552149 | 103.2 | 0.831 | 0.796 | 0.831 |
| rs2006752 | 29213864 | 113.2 | 0.828 | 0.736 | 0.828 |
| rs2530699 | 30723998 | 100.2 | 0.828 | 0.585 | 0.828 |
| rs707917 | 31428512 | 113.2 | 0.827 | 0.739 | 0.827 |
| rs6531 | 33164898 | 108.1 | 0.825 | 0.803 | 0.825 |
| rs2206042 | 29205028 | 110.2 | 0.825 | 0.725 | 0.825 |
| rs6457452 | 31854402 | 116.1 | 0.823 | 0.524 | 0.823 |
| rs1362064 | 29423356 | 88.2 | 0.816 | 0.653 | 0.816 |
| rs4424066 | 32125185 | 113.2 | 0.815 | 0.298 | 0.815 |
| rs3094110 | 30569801 | 103.2 | 0.814 | 0.808 | 0.814 |
| rs2242668 | 31544579 | 98.2 | 0.814 | 0.803 | 0.814 |
| rs6910451 | 29342724 | 116.1 | 0.814 | 0.753 | 0.814 |
| rs3823355 | 30002851 | 107.2 | 0.809 | 0.573 | 0.809 |
| rs3130667 | 30513999 | 103.2 | 0.807 | 0.614 | 0.807 |
| rs2071293 | 32088715 | 96.1 | 0.798 | 0.653 | 0.798 |
| rs1063478 | 32910958 | 111.2 | 0.797 | 0.796 | 0.797 |
| rs2242654 | 31425249 | 98.1 | 0.796 | 0.656 | 0.796 |
| rs2394994 | 31162376 | 100.2 | 0.793 | 0.747 | 0.793 |
| rs3130805 | 29077211 | 103.2 | 0.793 | 0.477 | 0.793 |
| rs2269429 | 31799940 | 100.2 | 0.793 | 0.301 | 0.793 |
| rs3132587 | 30745781 | 103.2 | 0.791 | 0.581 | 0.791 |
| rs2300825 | 32625659 | 100.2 | 0.789 | 0.698 | 0.789 |
| rs7744304 | 32451227 | 116.1 | 0.788 | 0.723 | 0.788 |
| rs1233388 | 29616179 | 100.1 | 0.787 | 0.648 | 0.787 |
| rs4711279 | 31861106 | 111.2 | 0.787 | 0.371 | 0.787 |
| rs6915800 | 31892654 | 116.1 | 0.777 | 0.757 | 0.777 |
| rs11908 | 32938171 | 106.2 | 0.772 | 0.737 | 0.772 |
| rs1059288 | 33260371 | 116.2 | 0.767 | 0.656 | 0.767 |
| rs3025657 | 29579073 | 102.2 | 0.766 | 0.714 | 0.766 |
| rs213209 | 33169673 | 116.2 | 0.762 | 0.678 | 0.762 |
| rs7766900 | 32831555 | 116.1 | 0.761 | 0.257 | 0.761 |
| rs3130268 | 33308852 | 116.2 | 0.756 | 0.663 | 0.756 |
| rs3749952 | 31741835 | 111.2 | 0.752 | 0.699 | 0.752 |
| rs6456951 | 29488632 | 116.1 | 0.738 | 0.632 | 0.738 |
| rs2523974 | 29860186 | 100.2 | 0.736 | 0.695 | 0.736 |
| rs6904236 | 30656841 | 116.1 | 0.728 | 0.645 | 0.728 |
| rs4713518 | 32028094 | 111.2 | 0.728 | 0.518 | 0.728 |
| rs2267646 | 32708744 | 100.2 | 0.721 | 0.684 | 0.721 |
| rs502626 | 32049023 | 108.2 | 0.697 | 0.643 | 0.697 |
| rs6468 | 31744340 | 86.2 | 0.675 | 0.376 | 0.675 |
| rs3129110 | 29147775 | 103.2 | 0.666 | 0.49 | 0.666 |
| rs6456947 | 29450733 | 116.1 | 0.666 | 0.486 | 0.666 |
| rs3129154 | 29202338 | 103.2 | 0.658 | 0.633 | 0.658 |
| rs1009382 | 32045823 | 103.2 | 0.655 | 0.571 | 0.655 |
| rs1043618 | 31554265 | 111.1 | 0.652 | 0.625 | 0.652 |
| rs7754402 | 29391405 | 116.1 | 0.63 | 0.449 | 0.63 |
| rs2269706 | 30714010 | 100.2 | 0.617 | 0.612 | 0.617 |
| rs4713505 | 32124732 | 111.2 | 0.611 | 0.304 | 0.611 |
| rs205000 | 31906635 | 106.2 | 0.96 | 0.652 | 0.96 |
| rs2071278 | 32185187 | 103.2 | 0.935 | 0.91 | 0.935 |
| rs477005 | 32041257 | 87.2 | 0.929 | 0.802 | 0.929 |
| rs535586 | 31919326 | 100.1 | 0.961 | 0.618 | 0.961 |
| rs1052248 | 31615258 | 110.2 | 0.993 | 0.749 | 0.993 |
| rs621701 | 31961861 | 101.2 | 0.984 | 0.766 | 0.984 |
| rs2072679 | 31638197 | 98.1 | 0.98 | 0.758 | 0.98 |
| rs805257 | 31692878 | 100.2 | 0.978 | 0.68 | 0.978 |
| rs469064 | 33243171 | 94.1 | 0.955 | 0.906 | 0.955 |
| rs1264517 | 30181590 | 100.1 | 0.952 | 0.866 | 0.952 |
| rs211457 | 33367092 | 116.2 | 0.949 | 0.754 | 0.949 |
| rs537160 | 31687158 | 110.1 | 0.941 | 0.771 | 0.941 |
| rs2075800 | 31548704 | 100.2 | 0.921 | 0.827 | 0.921 |
| rs707926 | 31807660 | 100.2 | 0.904 | 0.784 | 0.904 |
| rs387608 | 31712315 | 100.1 | 0.866 | 0.764 | 0.866 |
| rs2071888 | 33274302 | 106.2 | 0.827 | 0.628 | 0.827 |
| rs2073524 | 33283250 | 103.2 | 0.816 | 0.725 | 0.816 |
| rs805306 | 31750845 | 100.2 | 0.75 | 0.615 | 0.75 |
| rs486416 | 31914889 | 87.1 | 0.738 | 0.574 | 0.738 |
| rs652888 | 31621992 | 100.1 | 0.709 | 0.588 | 0.709 |
| rs2075798 | 31905730 | 98.1 | 0.69 | 0.602 | 0.69 |

[0108] TABLE 2

| | Allele | Allele | Locas |
|---|---|---|---|
| | Sequence | sequence | sequence |
| SNP Name | of first ASO | of second ASO | of LSO |
| rs2395256 | SEQ ID NO: 1 | SEQ ID NO: 2367 | SEQ ID NO: 4733 |
| rs1894411 | SEQ ID NO: 2 | SEQ ID NO: 2368 | SEQ ID NO: 4734 |
| rs2621414 | SEQ ID NO: 3 | SEQ ID NO: 2369 | SEQ ID NO: 4735 |
| rs1264298 | SEQ ID NO: 4 | SEQ ID NO: 2370 | SEQ ID NO: 4736 |
| rs1264307 | SEQ ID NO: 5 | SEQ ID NO: 2371 | SEQ ID NO: 4737 |
| rs241454 | SEQ ID NO: 6 | SEQ ID NO: 2372 | SEQ ID NO: 4738 |
| rs3134996 | SEQ ID NO: 7 | SEQ ID NO: 2373 | SEQ ID NO: 4739 |
| rs2294882 | SEQ ID NO: 8 | SEQ ID NO: 2374 | SEQ ID NO: 4740 |
| rs2001100 | SEQ ID NO: 9 | SEQ ID NO: 2375 | SEQ ID NO: 4741 |
| rs2273017 | SEQ ID NO: 10 | SEQ ID NO: 2376 | SEQ ID NO: 4742 |
| rs3817969 | SEQ ID NO: 11 | SEQ ID NO: 2377 | SEQ ID NO: 4743 |
| rs761189 | SEQ ID NO: 12 | SEQ ID NO: 2378 | SEQ ID NO: 4744 |
| rs3129736 | SEQ ID NO: 13 | SEQ ID NO: 2379 | SEQ ID NO: 4745 |
| rs3763350 | SEQ ID NO: 14 | SEQ ID NO: 2380 | SEQ ID NO: 4746 |
| rs3135374 | SEQ ID NO: 15 | SEQ ID NO: 2381 | SEQ ID NO: 4747 |
| rs2294880 | SEQ ID NO: 16 | SEQ ID NO: 2382 | SEQ ID NO: 4748 |
| rs397081 | SEQ ID NO: 17 | SEQ ID NO: 2383 | SEQ ID NO: 4749 |
| rs3021302 | SEQ ID NO: 18 | SEQ ID NO: 2384 | SEQ ID NO: 4750 |
| rs3129871 | SEQ ID NO: 19 | SEQ ID NO: 2385 | SEQ ID NO: 4751 |
| rs365053 | SEQ ID NO: 20 | SEQ ID NO: 2386 | SEQ ID NO: 4752 |
| rs1264308 | SEQ ID NO: 21 | SEQ ID NO: 2387 | SEQ ID NO: 4753 |
| rs3806156 | SEQ ID NO: 22 | SEQ ID NO: 2388 | SEQ ID NO: 4754 |
| rs2253588 | SEQ ID NO: 23 | SEQ ID NO: 2389 | SEQ ID NO: 47SS |
| rs2074512 | SEQ ID NO: 24 | SEQ ID NO: 2390 | SEQ ID NO: 47S6 |
| rs2076536 | SEQ ID NO: 25 | SEQ ID NO: 2391 | SEQ ID NO: 47S7 |
| rs1988563 | SEQ ID NO: 26 | SEQ ID NO: 2392 | SEQ ID NO: 4758 |
| rs2253705 | SEQ ID NO: 27 | SEQ ID NO: 2393 | SEQ ID NO: 4759 |
| rs1894412 | SEQ ID NO: 28 | SEQ ID NO: 2394 | SEQ ID NO: 4760 |
| rs2071554 | SEQ ID NO: 29 | SEQ ID NO: 2395 | SEQ ID NO: 4761 |
| rs2395264 | SEQ ID NO: 30 | SEQ ID NO: 2396 | SEQ ID NO: 4762 |
| rs2071290 | SEQ ID NO: 31 | SEQ ID NO: 2397 | SEQ ID NO: 4763 |
| rs885912 | SEQ ID NO: 32 | SEQ ID NO: 2398 | SEQ ID NO: 4764 |
| rs2073717 | SEQ ID NO: 33 | SEQ ID NO: 2399 | SEQ ID NO: 4765 |
| rs3873444 | SEQ ID NO: 34 | SEQ ID NO: 2400 | SEQ ID NO: 4766 |
| rs261949 | SEQ ID NO: 35 | SEQ ID NO: 2401 | SEQ ID NO: 4767 |
| rs2187818 | SEQ ID NO: 36 | SEQ ID NO: 2402 | SEQ ID NO: 4768 |
| rs2071550 | SEQ ID NO: 37 | SEQ ID NO: 2403 | SEQ ID NO: 4769 |
| rs1573649 | SEQ ID NO: 38 | SEQ ID NO: 2404 | SEQ ID NO: 4770 |
| rs2395110 | SEQ ID NO: 39 | SEQ ID NO: 2405 | SEQ ID NO: 4771 |
| rs2073046 | SEQ ID NO: 40 | SEQ ID NO: 2406 | SEQ ID NO: 4772 |
| rs2073047 | SEQ ID NO: 41 | SEQ ID NO: 2407 | SEQ ID NO: 4773 |
| rs743862 | SEQ ID NO: 42 | SEQ ID NO: 2408 | SEQ ID NO: 4774 |
| rs2074488 | SEQ ID NO: 43 | SEQ ID NO: 2409 | SEQ ID NO: 4775 |
| rs2072895 | SEQ ID NO: 44 | SEQ ID NO: 2410 | SEQ ID NO: 4776 |
| rs2076537 | SEQ ID NO: 45 | SEQ ID NO: 2411 | SEQ ID NO: 4777 |
| rs2072110 | SEQ ID NO: 46 | SEQ ID NO: 2412 | SEQ ID NO: 4778 |
| rs13501 | SEQ ID NO: 47 | SEQ ID NO: 2413 | SEQ ID NO: 4779 |
| rs2072896 | SEQ ID NO: 48 | SEQ ID NO: 2414 | SEQ ID NO: 4780 |
| rs2581 | SEQ ID NO: 49 | SEQ ID NO: 2415 | SEQ ID NO: 4781 |
| rs2023472 | SEQ ID NO: 50 | SEQ ID NO: 2416 | SEQ ID NO: 4782 |
| rs2006165 | SEQ ID NO: 51 | SEQ ID NO: 2417 | SEQ ID NO: 4783 |
| rs2395533 | SEQ ID NO: 52 | SEQ ID NO: 2418 | SEQ ID NO: 4784 |
| rs2269703 | SEQ ID NO: 53 | SEQ ID NO: 2419 | SEQ ID NO: 4785 |
| rs259919 | SEQ ID NO: 54 | SEQ ID NO: 2420 | SEQ ID NO: 4786 |
| rs1265760 | SEQ ID NO: 55 | SEQ ID NO: 2421 | SEQ ID NO: 4787 |
| rs241428 | SEQ ID NO: 56 | SEQ ID NO: 2422 | SEQ ID NO: 4788 |
| rs3763316 | SEQ ID NO: 57 | SEQ ID NO: 2423 | SEQ ID NO: 4789 |
| rs8084 | SEQ ID NO: 58 | SEQ ID NO: 2424 | SEQ ID NO: 4790 |
| rs1042337 | SEQ ID NO: 59 | SEQ ID NO: 2425 | SEQ ID NO: 4791 |
| rs2269713 | SEQ ID NO: 60 | SEQ ID NO: 2426 | SEQ ID NO: 4792 |
| rs2239524 | SEQ ID NO: 61 | SEQ ID NO: 2427 | SEQ ID NO: 4793 |
| rs3115569 | SEQ ID NO: 62 | SEQ ID NO: 2428 | SEQ ID NO: 4794 |
| rs241448 | SEQ ID NO: 63 | SEQ ID NO: 2429 | SEQ ID NO: 4795 |
| rs2071475 | SEQ ID NO: 64 | SEQ ID NO: 2430 | SEQ ID NO: 4796 |
| rs365066 | SEQ ID NO: 65 | SEQ ID NO: 2431 | SEQ ID NO: 4797 |
| rs2022059 | SEQ ID NO: 66 | SEQ ID NO: 2432 | SEQ ID NO: 4798 |
| rs2071474 | SEQ ID NO: 67 | SEQ ID NO: 2433 | SEQ ID NO: 4799 |
| rs3129745 | SEQ ID NO: 68 | SEQ ID NO: 2434 | SEQ ID NO: 4800 |
| rs2213572 | SEQ ID NO: 69 | SEQ ID NO: 2435 | SEQ ID NO: 4801 |
| rs2286656 | SEQ ID NO: 70 | SEQ ID NO: 2436 | SEQ ID NO: 4802 |
| rs2070121 | SEQ ID NO: 71 | SEQ ID NO: 2437 | SEQ ID NO: 4803 |
| rs3117098 | SEQ ID NO: 72 | SEQ ID NO: 2438 | SEQ ID NO: 4804 |
| rs926594 | SEQ ID NO: 73 | SEQ ID NO: 2439 | SEQ ID NO: 4805 |
| rs2621393 | SEQ ID NO: 74 | SEQ ID NO: 2440 | SEQ ID NO: 4806 |
| rs7192 | SEQ ID NO: 75 | SEQ ID NO: 2441 | SEQ ID NO: 4807 |
| rs14004 | SEQ ID NO: 76 | SEQ ID NO: 2442 | SEQ ID NO: 4808 |
| rs3134943 | SEQ ID NO: 77 | SEQ ID NO: 2443 | SEQ ID NO: 4809 |
| rs2213585 | SEQ ID NO: 78 | SEQ ID NO: 2444 | SEQ ID NO: 4810 |
| rs2072894 | SEQ ID NO: 79 | SEQ ID NO: 2445 | SEQ ID NO: 4811 |
| rs2286655 | SEQ ID NO: 80 | SEQ ID NO: 2446 | SEQ ID NO: 4812 |
| rs886420 | SEQ ID NO: 81 | SEQ ID NO: 2447 | SEQ ID NO: 4813 |
| rs2074504 | SEQ ID NO: 82 | SEQ ID NO: 2448 | SEQ ID NO: 4814 |
| rs2301270 | SEQ ID NO: 83 | SEQ ID NO: 2449 | SEQ ID NO: 4815 |
| rs3763310 | SEQ ID NO: 84 | SEQ ID NO: 2450 | SEQ ID NO: 4816 |
| rs241446 | SEQ ID NO: 85 | SEQ ID NO: 2451 | SEQ ID NO: 4817 |
| rs3129876 | SEQ ID NO: 86 | SEQ ID NO: 2452 | SEQ ID NO: 4818 |
| rs1043483 | SEQ ID NO: 87 | SEQ ID NO: 2453 | SEQ ID NO: 4819 |
| rs2286405 | SEQ ID NO: 88 | SEQ ID NO: 2454 | SEQ ID NO: 4820 |
| rs2284175 | SEQ ID NO: 89 | SEQ ID NO: 2455 | SEQ ID NO: 4821 |
| rs1362122 | SEQ ID NO: 90 | SEQ ID NO: 2456 | SEQ ID NO: 4822 |
| rs1265155 | SEQ ID NO: 91 | SEQ ID NO: 2457 | SEQ ID NO: 4823 |
| rs2267641 | SEQ ID NO: 92 | SEQ ID NO: 2458 | SEQ ID NO: 4824 |
| rs2647089 | SEQ ID NO: 93 | SEQ ID NO: 2459 | SEQ ID NO: 4825 |
| rs2240619 | SEQ ID NO: 94 | SEQ ID NO: 2460 | SEQ ID NO: 4826 |
| rs1061808 | SEQ ID NO: 95 | SEQ ID NO: 2461 | SEQ ID NO: 4827 |
| rs2249099 | SEQ ID NO: 96 | SEQ ID NO: 2462 | SEQ ID NO: 4828 |
| rs1264309 | SEQ ID NO: 97 | SEQ ID NO: 2463 | SEQ ID NO: 4829 |
| rs3763305 | SEQ ID NO: 98 | SEQ ID NO: 2464 | SEQ ID NO: 4830 |
| rs2073724 | SEQ ID NO: 99 | SEQ ID NO: 2465 | SEQ ID NO: 4831 |
| rs2582 | SEQ ID NO: 100 | SEQ ID NO: 2466 | SEQ ID NO: 4832 |
| rs2074484 | SEQ ID NO: 101 | SEQ ID NO: 2467 | SEQ ID NO: 4833 |
| rs3134945 | SEQ ID NO: 102 | SEQ ID NO: 2468 | SEQ ID NO: 4834 |
| rs2269418 | SEQ ID NO: 103 | SEQ ID NO: 2469 | SEQ ID NO: 4835 |
| rs3749968 | SEQ ID NO: 104 | SEQ ID NO: 2470 | SEQ ID NO: 4836 |
| rs2856705 | SEQ ID NO: 105 | SEQ ID NO: 2471 | SEQ ID NO: 4837 |
| rs2071283 | SEQ ID NO: 106 | SEQ ID NO: 2472 | SEQ ID NO: 4838 |
| rs2239518 | SEQ ID NO: 107 | SEQ ID NO: 2473 | SEQ ID NO: 4839 |
| rs2240804 | SEQ ID NO: 108 | SEQ ID NO: 2474 | SEQ ID NO: 4840 |
| rs2076525 | SEQ ID NO: 109 | SEQ ID NO: 2475 | SEQ ID NO: 4841 |
| rs3806157 | SEQ ID NO: 110 | SEQ ID NO: 2476 | SEQ ID NO: 4842 |
| rs2187823 | SEQ ID NO: 111 | SEQ ID NO: 2477 | SEQ ID NO: 4843 |
| rs3129858 | SEQ ID NO: 112 | SEQ ID NO: 2478 | SEQ ID NO: 4844 |
| rs3135396 | SEQ ID NO: 113 | SEQ ID NO: 2479 | SEQ ID NO: 4845 |
| rs1736917 | SEQ ID NO: 114 | SEQ ID NO: 2480 | SEQ ID NO: 4846 |
| rs3213485 | SEQ ID NO: 115 | SEQ ID NO: 2481 | SEQ ID NO: 4847 |
| rs184003 | SEQ ID NO: 116 | SEQ ID NO: 2482 | SEQ ID NO: 4848 |
| rs2647086 | SEQ ID NO: 117 | SEQ ID NO: 2483 | SEQ ID NO: 4849 |
| rs2235383 | SEQ ID NO: 118 | SEQ ID NO: 2484 | SEQ ID NO: 4850 |
| rs3817970 | SEQ ID NO: 119 | SEQ ID NO: 2485 | SEQ ID NO: 4851 |
| rs2213574 | SEQ ID NO: 120 | SEQ ID NO: 2486 | SEQ ID NO: 4852 |
| rs2858857 | SEQ ID NO: 121 | SEQ ID NO: 2487 | SEQ ID NO: 4853 |
| rs2227139 | SEQ ID NO: 122 | SEQ ID NO: 2488 | SEQ ID NO: 4854 |
| rs709052 | SEQ ID NO: 123 | SEQ ID NO: 2489 | SEQ ID NO: 4855 |
| rs2239519 | SEQ ID NO: 124 | SEQ ID NO: 2490 | SEQ ID NO: 4856 |
| rs3844313 | SEQ ID NO: 125 | SEQ ID NO: 2491 | SEQ ID NO: 4857 |
| rs2076534 | SEQ ID NO: 126 | SEQ ID NO: 2492 | SEQ ID NO: 4858 |
| rs2074490 | SEQ ID NO: 127 | SEQ ID NO: 2493 | SEQ ID NO: 4859 |
| rs1049033 | SEQ ID NO: 128 | SEQ ID NO: 2494 | SEQ ID NO: 4860 |
| rs206019 | SEQ ID NO: 129 | SEQ ID NO: 2495 | SEQ ID NO: 4861 |
| rs1265157 | SEQ ID NO: 130 | SEQ ID NO: 2496 | SEQ ID NO: 4862 |
| rs1044043 | SEQ ID NO: 131 | SEQ ID NO: 2497 | SEQ ID NO: 4863 |
| rs1615839 | SEQ ID NO: 132 | SEQ ID NO: 2498 | SEQ ID NO: 4864 |
| rs2071555 | SEQ ID NO: 133 | SEQ ID NO: 2499 | SEQ ID NO: 4865 |
| rs241441 | SEQ ID NO: 134 | SEQ ID NO: 2500 | SEQ ID NO: 4866 |
| rs1624278 | SEQ ID NO: 135 | SEQ ID NO: 2501 | SEQ ID NO: 4867 |
| rs2395195 | SEQ ID NO: 136 | SEQ ID NO: 2502 | SEQ ID NO: 4868 |
| rs915667 | SEQ ID NO: 137 | SEQ ID NO: 2503 | SEQ ID NO: 4869 |
| rs1964995 | SEQ ID NO: 138 | SEQ ID NO: 2504 | SEQ ID NO: 4870 |
| rs3117226 | SEQ ID NO: 139 | SEQ ID NO: 2505 | SEQ ID NO: 4871 |
| rs2858333 | SEQ ID NO: 140 | SEQ ID NO: 2506 | SEQ ID NO: 4872 |
| rs3025644 | SEQ ID NO: 141 | SEQ ID NO: 2507 | SEQ ID NO: 4873 |
| rs3129939 | SEQ ID NO: 142 | SEQ ID NO: 2508 | SEQ ID NO: 4874 |
| rs2534655 | SEQ ID NO: 143 | SEQ ID NO: 2509 | SEQ ID NO: 4875 |
| rs2144425 | SEQ ID NO: 144 | SEQ ID NO: 2510 | SEQ ID NO: 4876 |
| rs2523969 | SEQ ID NO: 145 | SEQ ID NO: 2511 | SEQ ID NO: 4877 |
| rs2746149 | SEQ ID NO: 146 | SEQ ID NO: 2512 | SEQ ID NO: 4878 |
| rs1265048 | SEQ ID NO: 147 | SEQ ID NO: 2513 | SEQ ID NO: 4879 |
| rs2535276 | SEQ ID NO: 148 | SEQ ID NO: 2514 | SEQ ID NO: 4880 |
| rs3129267 | SEQ ID NO: 149 | SEQ ID NO: 2515 | SEQ ID NO: 4881 |
| rs3095314 | SEQ ID NO: 150 | SEQ ID NO: 2516 | SEQ ID NO: 4882 |
| rs2844720 | SEQ ID NO: 151 | SEQ ID NO: 2517 | SEQ ID NO: 4883 |
| rs2294476 | SEQ ID NO: 152 | SEQ ID NO: 2518 | SEQ ID NO: 4884 |
| rs2394517 | SEQ ID NO: 153 | SEQ ID NO: 2519 | SEQ ID NO: 4885 |
| rs916571 | SEQ ID NO: 154 | SEQ ID NO: 2520 | SEQ ID NO: 4886 |
| rs3129941 | SEQ ID NO: 155 | SEQ ID NO: 2521 | SEQ ID NO: 4887 |
| rs3817659 | SEQ ID NO: 156 | SEQ ID NO: 2522 | SEQ ID NO: 4888 |
| rs2596449 | SEQ ID NO: 157 | SEQ ID NO: 2523 | SEQ ID NO: 4889 |
| rs176250 | SEQ ID NO: 158 | SEQ ID NO: 2524 | SEQ ID NO: 4890 |
| rs6457116 | SEQ ID NO: 159 | SEQ ID NO: 2525 | SEQ ID NO: 4891 |
| rs2524070 | SEQ ID NO: 160 | SEQ ID NO: 2526 | SEQ ID NO: 4892 |
| rs2857178 | SEQ ID NO: 161 | SEQ ID NO: 2527 | SEQ ID NO: 4893 |
| rs3218822 | SEQ ID NO: 162 | SEQ ID NO: 2528 | SEQ ID NO: 4894 |
| rs3817981 | SEQ ID NO: 163 | SEQ ID NO: 2529 | SEQ ID NO: 4895 |
| rs1610735 | SEQ ID NO: 164 | SEQ ID NO: 2530 | SEQ ID NO: 4896 |
| rs2394737 | SEQ ID NO: 165 | SEQ ID NO: 2531 | SEQ ID NO: 4897 |
| rs2239530 | SEQ ID NO: 166 | SEQ ID NO: 2532 | SEQ ID NO: 4898 |
| rs4415152 | SEQ ID NO: 167 | SEQ ID NO: 2533 | SEQ ID NO: 4899 |
| rs4434496 | SEQ ID NO: 168 | SEQ ID NO: 2534 | SEQ ID NO: 4900 |
| rs3130602 | SEQ ID NO: 169 | SEQ ID NO: 2535 | SEQ ID NO: 4901 |
| rs211456 | SEQ ID NO: 170 | SEQ ID NO: 2536 | SEQ ID NO: 4902 |
| rs3091282 | SEQ ID NO: 171 | SEQ ID NO: 2537 | SEQ ID NO: 4903 |
| rs4959036 | SEQ ID NO: 172 | SEQ ID NO: 2538 | SEQ ID NO: 4904 |
| rs2524103 | SEQ ID NO: 173 | SEQ ID NO: 2539 | SEQ ID NO: 4905 |
| rs45855 | SEQ ID NO: 174 | SEQ ID NO: 2540 | SEQ ID NO: 4906 |
| rs3130404 | SEQ ID NO: 175 | SEQ ID NO: 2541 | SEQ ID NO: 4907 |
| rs211453 | SEQ ID NO: 176 | SEQ ID NO: 2542 | SEQ ID NO: 4908 |
| rs3135375 | SEQ ID NO: 177 | SEQ ID NO: 2543 | SEQ ID NO: 4909 |
| rs3129767 | SEQ ID NO: 178 | SEQ ID NO: 2544 | SEQ ID NO: 4910 |
| rs7744593 | SEQ ID NO: 179 | SEQ ID NO: 2545 | SEQ ID NO: 4911 |
| rs2734979 | SEQ ID NO: 180 | SEQ ID NO: 2546 | SEQ ID NO: 4912 |
| rs3094149 | SEQ ID NO: 181 | SEQ ID NO: 2547 | SEQ ID NO: 4913 |
| rs2517723 | SEQ ID NO: 182 | SEQ ID NO: 2548 | SEQ ID NO: 4914 |
| rs1632995 | SEQ ID NO: 183 | SEQ ID NO: 2549 | SEQ ID NO: 4915 |
| rs4248143 | SEQ ID NO: 184 | SEQ ID NO: 2550 | SEQ ID NO: 4916 |
| rs8807 | SEQ ID NO: 185 | SEQ ID NO: 2551 | SEQ ID NO: 4917 |
| rs3130745 | SEQ ID NO: 186 | SEQ ID NO: 2552 | SEQ ID NO: 4918 |
| rs2858331 | SEQ ID NO: 187 | SEQ ID NO: 2553 | SEQ ID NO: 4919 |
| rs2596503 | SEQ ID NO: 188 | SEQ ID NO: 2554 | SEQ ID NO: 4920 |
| rs2517529 | SEQ ID NO: 189 | SEQ ID NO: 2555 | SEQ ID NO: 4921 |
| rs761188 | SEQ ID NO: 190 | SEQ ID NO: 2556 | SEQ ID NO: 4922 |
| rs2295664 | SEQ ID NO: 191 | SEQ ID NO: 2557 | SEQ ID NO: 4923 |
| rs2523504 | SEQ ID NO: 192 | SEQ ID NO: 2558 | SEQ ID NO: 4924 |
| rs7381625 | SEQ ID NO: 193 | SEQ ID NO: 2559 | SEQ ID NO: 4925 |
| rs407161 | SEQ ID NO: 194 | SEQ ID NO: 2560 | SEQ ID NO: 4926 |
| rs3900268 | SEQ ID NO: 195 | SEQ ID NO: 2561 | SEQ ID NO: 4927 |
| rs3117123 | SEQ ID NO: 196 | SEQ ID NO: 2562 | SEQ ID NO: 4928 |
| rs211455 | SEQ ID NO: 197 | SEQ ID NO: 2563 | SEQ ID NO: 4929 |
| rs7451341 | SEQ ID NO: 198 | SEQ ID NO: 2564 | SEQ ID NO: 4930 |
| rs3095312 | SEQ ID NO: 199 | SEQ ID NO: 2565 | SEQ ID NO: 4931 |
| rs6932266 | SEQ ID NO: 200 | SEQ ID NO: 2566 | SEQ ID NO: 4932 |
| rs2295120 | SEQ ID NO: 201 | SEQ ID NO: 2567 | SEQ ID NO: 4933 |
| rs458679 | SEQ ID NO: 202 | SEQ ID NO: 2568 | SEQ ID NO: 4934 |
| rs763028 | SEQ ID NO: 203 | SEQ ID NO: 2569 | SEQ ID NO: 4935 |
| rs1360 | SEQ ID NO: 204 | SEQ ID NO: 2570 | SEQ ID NO: 4936 |
| rs2734574 | SEQ ID NO: 205 | SEQ ID NO: 2571 | SEQ ID NO: 4937 |
| rs1548515 | SEQ ID NO: 206 | SEQ ID NO: 2572 | SEQ ID NO: 4938 |
| rs1610736 | SEQ ID NO: 207 | SEQ ID NO: 2573 | SEQ ID NO: 4939 |
| rs1573648 | SEQ ID NO: 208 | SEQ ID NO: 2574 | SEQ ID NO: 4940 |
| rs3807035 | SEQ ID NO: 209 | SEQ ID NO: 2575 | SEQ ID NO: 4941 |
| rs3763354 | SEQ ID NO: 210 | SEQ ID NO: 2576 | SEQ ID NO: 4942 |
| rs2855437 | SEQ ID NO: 211 | SEQ ID NO: 2577 | SEQ ID NO: 4943 |
| rs3117008 | SEQ ID NO: 212 | SEQ ID NO: 2578 | SEQ ID NO: 4944 |
| rs3823342 | SEQ ID NO: 213 | SEQ ID NO: 2579 | SEQ ID NO: 4945 |
| rs2254618 | SEQ ID NO: 214 | SEQ ID NO: 2580 | SEQ ID NO: 4946 |
| rs1541270 | SEQ ID NO: 215 | SEQ ID NO: 2581 | SEQ ID NO: 4947 |
| rs3817962 | SEQ ID NO: 216 | SEQ ID NO: 2582 | SEQ ID NO: 4948 |
| rs3763313 | SEQ ID NO: 217 | SEQ ID NO: 2583 | SEQ ID NO: 4949 |
| rs1611651 | SEQ ID NO: 218 | SEQ ID NO: 2584 | SEQ ID NO: 4950 |
| rs2516713 | SEQ ID NO: 219 | SEQ ID NO: 2585 | SEQ ID NO: 4951 |
| rs3869070 | SEQ ID NO: 220 | SEQ ID NO: 2586 | SEQ ID NO: 4952 |
| rs7743412 | SEQ ID NO: 221 | SEQ ID NO: 2587 | SEQ ID NO: 4953 |
| rs1541267 | SEQ ID NO: 222 | SEQ ID NO: 2588 | SEQ ID NO: 4954 |
| rs2853977 | SEQ ID NO: 223 | SEQ ID NO: 2589 | SEQ ID NO: 4955 |
| rs3891156 | SEQ ID NO: 224 | SEQ ID NO: 2590 | SEQ ID NO: 4956 |
| rs2394607 | SEQ ID NO: 225 | SEQ ID NO: 2591 | SEQ ID NO: 4957 |
| rs1028411 | SEQ ID NO: 226 | SEQ ID NO: 2592 | SEQ ID NO: 4958 |
| rs2022065 | SEQ ID NO: 227 | SEQ ID NO: 2593 | SEQ ID NO: 4959 |
| rs2294748 | SEQ ID NO: 228 | SEQ ID NO: 2594 | SEQ ID NO: 4960 |
| rs6933541 | SEQ ID NO: 229 | SEQ ID NO: 2595 | SEQ ID NO: 4961 |
| rs1419638 | SEQ ID NO: 230 | SEQ ID NO: 2596 | SEQ ID NO: 4962 |
| rs13395 | SEQ ID NO: 231 | SEQ ID NO: 2597 | SEQ ID NO: 4963 |
| rs64036 | SEQ ID NO: 232 | SEQ ID NO: 2598 | SEQ ID NO: 4964 |
| rs727939 | SEQ ID NO: 233 | SEQ ID NO: 2599 | SEQ ID NO: 4965 |
| rs10751 | SEQ ID NO: 234 | SEQ ID NO: 2600 | SEQ ID NO: 4966 |
| rs3869065 | SEQ ID NO: 235 | SEQ ID NO: 2601 | SEQ ID NO: 4967 |
| rs3094061 | SEQ ID NO: 236 | SEQ ID NO: 2602 | SEQ ID NO: 4968 |
| rs419434 | SEQ ID NO: 237 | SEQ ID NO: 2603 | SEQ ID NO: 4969 |
| rs429916 | SEQ ID NO: 238 | SEQ ID NO: 2604 | SEQ ID NO: 4970 |
| rs3130603 | SEQ ID NO: 239 | SEQ ID NO: 2605 | SEQ ID NO: 4971 |
| rs397144 | SEQ ID NO: 240 | SEQ ID NO: 2606 | SEQ ID NO: 4972 |
| rs3873332 | SEQ ID NO: 241 | SEQ ID NO: 2607 | SEQ ID NO: 4973 |
| rs2735052 | SEQ ID NO: 242 | SEQ ID NO: 2608 | SEQ ID NO: 4974 |
| rs3134759 | SEQ ID NO: 243 | SEQ ID NO: 2609 | SEQ ID NO: 4975 |
| rs2571430 | SEQ ID NO: 244 | SEQ ID NO: 2610 | SEQ ID NO: 4976 |
| rs4713367 | SEQ ID NO: 245 | SEQ ID NO: 2611 | SEQ ID NO: 4977 |
| rs2523774 | SEQ ID NO: 246 | SEQ ID NO: 2612 | SEQ ID NO: 4978 |
| rs2233969 | SEQ ID NO: 247 | SEQ ID NO: 2613 | SEQ ID NO: 4979 |
| rs522162 | SEQ ID NO: 248 | SEQ ID NO: 2614 | SEQ ID NO: 4980 |
| rs3763324 | SEQ ID NO: 249 | SEQ ID NO: 2615 | SEQ ID NO: 4981 |
| rs1033568 | SEQ ID NO: 250 | SEQ ID NO: 2616 | SEQ ID NO: 4982 |
| rs1632984 | SEQ ID NO: 251 | SEQ ID NO: 2617 | SEQ ID NO: 4983 |
| rs1362060 | SEQ ID NO: 252 | SEQ ID NO: 2618 | SEQ ID NO: 4984 |
| rs7754443 | SEQ ID NO: 253 | SEQ ID NO: 2619 | SEQ ID NO: 4985 |
| rs2395351 | SEQ ID NO: 254 | SEQ ID NO: 2620 | SEQ ID NO: 4986 |
| rs2267644 | SEQ ID NO: 255 | SEQ ID NO: 2621 | SEQ ID NO: 4987 |
| rs29232 | SEQ ID NO: 256 | SEQ ID NO: 2622 | SEQ ID NO: 4988 |
| rs1633085 | SEQ ID NO: 257 | SEQ ID NO: 2623 | SEQ ID NO: 4989 |
| rs7743506 | SEQ ID NO: 258 | SEQ ID NO: 2624 | SEQ ID NO: 4990 |
| rs1737009 | SEQ ID NO: 259 | SEQ ID NO: 2625 | SEQ ID NO: 4991 |
| rs2844606 | SEQ ID NO: 260 | SEQ ID NO: 2626 | SEQ ID NO: 4992 |
| rs2394173 | SEQ ID NO: 261 | SEQ ID NO: 2627 | SEQ ID NO: 4993 |
| rs4392759 | SEQ ID NO: 262 | SEQ ID NO: 2628 | SEQ ID NO: 4994 |
| rs3132528 | SEQ ID NO: 263 | SEQ ID NO: 2629 | SEQ ID NO: 4995 |
| rs3130782 | SEQ ID NO: 264 | SEQ ID NO: 2630 | SEQ ID NO: 4996 |
| rs379221 | SEQ ID NO: 265 | SEQ ID NO: 2631 | SEQ ID NO: 4997 |
| rs7195 | SEQ ID NO: 266 | SEQ ID NO: 2632 | SEQ ID NO: 4998 |
| rs7383433 | SEQ ID NO: 267 | SEQ ID NO: 2633 | SEQ ID NO: 4999 |
| rs1632854 | SEQ ID NO: 268 | SEQ ID NO: 2634 | SEQ ID NO: 5000 |
| rs5007259 | SEQ ID NO: 269 | SEQ ID NO: 2635 | SEQ ID NO: 5001 |
| rs3130377 | SEQ ID NO: 270 | SEQ ID NO: 2636 | SEQ ID NO: 5002 |
| rs1419632 | SEQ ID NO: 271 | SEQ ID NO: 2637 | SEQ ID NO: 5003 |
| rs3819721 | SEQ ID NO: 272 | SEQ ID NO: 2638 | SEQ ID NO: 5004 |
| rs2071363 | SEQ ID NO: 273 | SEQ ID NO: 2639 | SEQ ID NO: 5005 |
| rs2233966 | SEQ ID NO: 274 | SEQ ID NO: 2640 | SEQ ID NO: 5006 |
| rs2621416 | SEQ ID NO: 275 | SEQ ID NO: 2641 | SEQ ID NO: 5007 |
| rs1736912 | SEQ ID NO: 276 | SEQ ID NO: 2642 | SEQ ID NO: 5008 |
| rs3763347 | SEQ ID NO: 277 | SEQ ID NO: 2643 | SEQ ID NO: 5009 |
| rs1610613 | SEQ ID NO: 278 | SEQ ID NO: 2644 | SEQ ID NO: 5010 |
| rs3135373 | SEQ ID NO: 279 | SEQ ID NO: 2645 | SEQ ID NO: 5011 |
| rs2523946 | SEQ ID NO: 280 | SEQ ID NO: 2646 | SEQ ID NO: 5012 |
| rs3873374 | SEQ ID NO: 281 | SEQ ID NO: 2647 | SEQ ID NO: 5013 |
| rs17034 | SEQ ID NO: 282 | SEQ ID NO: 2648 | SEQ ID NO: 5014 |
| rs2073149 | SEQ ID NO: 283 | SEQ ID NO: 2649 | SEQ ID NO: 5015 |
| rs2073150 | SEQ ID NO: 284 | SEQ ID NO: 2650 | SEQ ID NO: 5016 |
| rs3117007 | SEQ ID NO: 285 | SEQ ID NO: 2651 | SEQ ID NO: 5017 |
| rs3094207 | SEQ ID NO: 286 | SEQ ID NO: 2652 | SEQ ID NO: 5018 |
| rs3748082 | SEQ ID NO: 287 | SEQ ID NO: 2653 | SEQ ID NO: 5019 |
| rs423808 | SEQ ID NO: 288 | SEQ ID NO: 2654 | SEQ ID NO: 5020 |
| rs445150 | SEQ ID NO: 289 | SEQ ID NO: 2655 | SEQ ID NO: 5021 |
| rs3734841 | SEQ ID NO: 290 | SEQ ID NO: 2656 | SEQ ID NO: 5022 |
| rs3132523 | SEQ ID NO: 291 | SEQ ID NO: 2657 | SEQ ID NO: 5023 |
| rs3997854 | SEQ ID NO: 292 | SEQ ID NO: 2658 | SEQ ID NO: 5024 |
| rs2071482 | SEQ ID NO: 293 | SEQ ID NO: 2659 | SEQ ID NO: 5025 |
| rs2071469 | SEQ ID NO: 294 | SEQ ID NO: 2660 | SEQ ID NO: 5026 |
| rs2736155 | SEQ ID NO: 295 | SEQ ID NO: 2661 | SEQ ID NO: 5027 |
| rs2524198 | SEQ ID NO: 296 | SEQ ID NO: 2662 | SEQ ID NO: 5028 |
| rs560505 | SEQ ID NO: 297 | SEQ ID NO: 2663 | SEQ ID NO: 5029 |
| rs2894252 | SEQ ID NO: 298 | SEQ ID NO: 2664 | SEQ ID NO: 5030 |
| rs3094220 | SEQ ID NO: 299 | SEQ ID NO: 2665 | SEQ ID NO: 5031 |
| rs3763355 | SEQ ID NO: 300 | SEQ ID NO: 2666 | SEQ ID NO: 5032 |
| rs3823312 | SEQ ID NO: 301 | SEQ ID NO: 2667 | SEQ ID NO: 5033 |
| rs4999342 | SEQ ID NO: 302 | SEQ ID NO: 2668 | SEQ ID NO: 5034 |
| rs2517403 | SEQ ID NO: 303 | SEQ ID NO: 2669 | SEQ ID NO: 5035 |
| rs4987086 | SEQ ID NO: 304 | SEQ ID NO: 2670 | SEQ ID NO: 5036 |
| rs3819294 | SEQ ID NO: 305 | SEQ ID NO: 2671 | SEQ ID NO: 5037 |
| rs909728 | SEQ ID NO: 306 | SEQ ID NO: 2672 | SEQ ID NO: 5038 |
| rs2294477 | SEQ ID NO: 307 | SEQ ID NO: 2673 | SEQ ID NO: 5039 |
| rs3117229 | SEQ ID NO: 308 | SEQ ID NO: 2674 | SEQ ID NO: 5040 |
| rs3909178 | SEQ ID NO: 309 | SEQ ID NO: 2675 | SEQ ID NO: 5041 |
| rs3116985 | SEQ ID NO: 310 | SEQ ID NO: 2676 | SEQ ID NO: 5042 |
| rs3095320 | SEQ ID NO: 311 | SEQ ID NO: 2677 | SEQ ID NO: 5043 |
| rs241445 | SEQ ID NO: 312 | SEQ ID NO: 2678 | SEQ ID NO: 5044 |
| rs3828896 | SEQ ID NO: 313 | SEQ ID NO: 2679 | SEQ ID NO: 5045 |
| rs6914995 | SEQ ID NO: 314 | SEQ ID NO: 2680 | SEQ ID NO: 5046 |
| rs3815086 | SEQ ID NO: 315 | SEQ ID NO: 2681 | SEQ ID NO: 5047 |
| rs3132708 | SEQ ID NO: 316 | SEQ ID NO: 2682 | SEQ ID NO: 5048 |
| rs6457644 | SEQ ID NO: 317 | SEQ ID NO: 2683 | SEQ ID NO: 5049 |
| rs6914849 | SEQ ID NO: 318 | SEQ ID NO: 2684 | SEQ ID NO: 5050 |
| rs4151655 | SEQ ID NO: 319 | SEQ ID NO: 2685 | SEQ ID NO: 5051 |
| rs6457327 | SEQ ID NO: 320 | SEQ ID NO: 2686 | SEQ ID NO: 5052 |
| rs2647087 | SEQ ID NO: 321 | SEQ ID NO: 2687 | SEQ ID NO: 5053 |
| rs3830060 | SEQ ID NO: 322 | SEQ ID NO: 2688 | SEQ ID NO: 5054 |
| rs915653 | SEQ ID NO: 323 | SEQ ID NO: 2689 | SEQ ID NO: 5055 |
| rs2524059 | SEQ ID NO: 324 | SEQ ID NO: 2690 | SEQ ID NO: 5056 |
| rs6912673 | SEQ ID NO: 325 | SEQ ID NO: 2691 | SEQ ID NO: 5057 |
| rs4713218 | SEQ ID NO: 326 | SEQ ID NO: 2692 | SEQ ID NO: 5058 |
| rs3135372 | SEQ ID NO: 327 | SEQ ID NO: 2693 | SEQ ID NO: 5059 |
| rs3807034 | SEQ ID NO: 328 | SEQ ID NO: 2694 | SEQ ID NO: 5060 |
| rs2158285 | SEQ ID NO: 329 | SEQ ID NO: 2695 | SEQ ID NO: 5061 |
| rs2735061 | SEQ ID NO: 330 | SEQ ID NO: 2696 | SEQ ID NO: 5062 |
| rs204995 | SEQ ID NO: 331 | SEQ ID NO: 2697 | SEQ ID NO: 5063 |
| rs2596501 | SEQ ID NO: 332 | SEQ ID NO: 2698 | SEQ ID NO: 5064 |
| rs2256902 | SEQ ID NO: 333 | SEQ ID NO: 2699 | SEQ ID NO: 5065 |
| rs2844586 | SEQ ID NO: 334 | SEQ ID NO: 2700 | SEQ ID NO: 5066 |
| rs2293861 | SEQ ID NO: 335 | SEQ ID NO: 2701 | SEQ ID NO: 5067 |
| rs1233408 | SEQ ID NO: 336 | SEQ ID NO: 2702 | SEQ ID NO: 5068 |
| rs7382794 | SEQ ID NO: 337 | SEQ ID NO: 2703 | SEQ ID NO: 5069 |
| rs3830061 | SEQ ID NO: 338 | SEQ ID NO: 2704 | SEQ ID NO: 5070 |
| rs2524074 | SEQ ID NO: 339 | SEQ ID NO: 2705 | SEQ ID NO: 5071 |
| rs3131025 | SEQ ID NO: 340 | SEQ ID NO: 2706 | SEQ ID NO: 5072 |
| rs1034324 | SEQ ID NO: 341 | SEQ ID NO: 2707 | SEQ ID NO: 5073 |
| rs3130655 | SEQ ID NO: 342 | SEQ ID NO: 2708 | SEQ ID NO: 5074 |
| rs4713324 | SEQ ID NO: 343 | SEQ ID NO: 2709 | SEQ ID NO: 5075 |
| rs3129888 | SEQ ID NO: 344 | SEQ ID NO: 2710 | SEQ ID NO: 5076 |
| rs2071366 | SEQ ID NO: 345 | SEQ ID NO: 2711 | SEQ ID NO: 5077 |
| rs2074479 | SEQ ID NO: 346 | SEQ ID NO: 2712 | SEQ ID NO: 5078 |
| rs2516312 | SEQ ID NO: 347 | SEQ ID NO: 2713 | SEQ ID NO: 5079 |
| rs1737078 | SEQ ID NO: 348 | SEQ ID NO: 2714 | SEQ ID NO: 5080 |
| rs3734854 | SEQ ID NO: 349 | SEQ ID NO: 2715 | SEQ ID NO: 5081 |
| rs6901541 | SEQ ID NO: 350 | SEQ ID NO: 2716 | SEQ ID NO: 5082 |
| rs3916766 | SEQ ID NO: 351 | SEQ ID NO: 2717 | SEQ ID NO: 5083 |
| rs6919972 | SEQ ID NO: 352 | SEQ ID NO: 2718 | SEQ ID NO: 5084 |
| rs6911639 | SEQ ID NO: 353 | SEQ ID NO: 2719 | SEQ ID NO: 5085 |
| rs6921314 | SEQ ID NO: 354 | SEQ ID NO: 2720 | SEQ ID NO: 5086 |
| rs3135351 | SEQ ID NO: 355 | SEQ ID NO: 2721 | SEQ ID NO: 5087 |
| rs3129299 | SEQ ID NO: 356 | SEQ ID NO: 2722 | SEQ ID NO: 5088 |
| rs7745235 | SEQ ID NO: 357 | SEQ ID NO: 2723 | SEQ ID NO: 5089 |
| rs3819285 | SEQ ID NO: 358 | SEQ ID NO: 2724 | SEQ ID NO: 5090 |
| rs1233493 | SEQ ID NO: 359 | SEQ ID NO: 2725 | SEQ ID NO: 5091 |
| rs2066744 | SEQ ID NO: 360 | SEQ ID NO: 2726 | SEQ ID NO: 5092 |
| rs1367728 | SEQ ID NO: 361 | SEQ ID NO: 2727 | SEQ ID NO: 5093 |
| rs2853960 | SEQ ID NO: 362 | SEQ ID NO: 2728 | SEQ ID NO: 5094 |
| rs4151672 | SEQ ID NO: 363 | SEQ ID NO: 2729 | SEQ ID NO: 5095 |
| rs3891157 | SEQ ID NO: 364 | SEQ ID NO: 2730 | SEQ ID NO: 5096 |
| rs2394255 | SEQ ID NO: 365 | SEQ ID NO: 2731 | SEQ ID NO: 5097 |
| rs3128967 | SEQ ID NO: 366 | SEQ ID NO: 2732 | SEQ ID NO: 5098 |
| rs3130106 | SEQ ID NO: 367 | SEQ ID NO: 2733 | SEQ ID NO: 5099 |
| rs1059231 | SEQ ID NO: 368 | SEQ ID NO: 2734 | SEQ ID NO: 5100 |
| rs356966 | SEQ ID NO: 369 | SEQ ID NO: 2735 | SEQ ID NO: 5101 |
| rs2394605 | SEQ ID NO: 370 | SEQ ID NO: 2736 | SEQ ID NO: 5102 |
| rs2295118 | SEQ ID NO: 371 | SEQ ID NO: 2737 | SEQ ID NO: 5103 |
| rs2050191 | SEQ ID NO: 372 | SEQ ID NO: 2738 | SEQ ID NO: 5104 |
| rs427417 | SEQ ID NO: 373 | SEQ ID NO: 2739 | SEQ ID NO: 5105 |
| rs3828808 | SEQ ID NO: 374 | SEQ ID NO: 2740 | SEQ ID NO: 5106 |
| rs7383005 | SEQ ID NO: 375 | SEQ ID NO: 2741 | SEQ ID NO: 5107 |
| rs6940585 | SEQ ID NO: 376 | SEQ ID NO: 2742 | SEQ ID NO: 5108 |
| rs2294745 | SEQ ID NO: 377 | SEQ ID NO: 2743 | SEQ ID NO: 5109 |
| rs3128854 | SEQ ID NO: 378 | SEQ ID NO: 2744 | SEQ ID NO: 5110 |
| rs1633037 | SEQ ID NO: 379 | SEQ ID NO: 2745 | SEQ ID NO: 5111 |
| rs3132550 | SEQ ID NO: 380 | SEQ ID NO: 2746 | SEQ ID NO: 5112 |
| rs1610708 | SEQ ID NO: 381 | SEQ ID NO: 2747 | SEQ ID NO: 5113 |
| rs2844766 | SEQ ID NO: 382 | SEQ ID NO: 2748 | SEQ ID NO: 5114 |
| rs4713447 | SEQ ID NO: 383 | SEQ ID NO: 2749 | SEQ ID NO: 5115 |
| rs4151671 | SEQ ID NO: 384 | SEQ ID NO: 2750 | SEQ ID NO: 5116 |
| rs733840 | SEQ ID NO: 385 | SEQ ID NO: 2751 | SEQ ID NO: 5117 |
| rs3198005 | SEQ ID NO: 386 | SEQ ID NO: 2752 | SEQ ID NO: 5118 |
| rs2523814 | SEQ ID NO: 387 | SEQ ID NO: 2753 | SEQ ID NO: 5119 |
| rs7755580 | SEQ ID NO: 388 | SEQ ID NO: 2754 | SEQ ID NO: 5120 |
| rs2071364 | SEQ ID NO: 389 | SEQ ID NO: 2755 | SEQ ID NO: 5121 |
| rs2894239 | SEQ ID NO: 390 | SEQ ID NO: 2756 | SEQ ID NO: 5122 |
| rs3117230 | SEQ ID NO: 391 | SEQ ID NO: 2757 | SEQ ID NO: 5123 |
| rs1628578 | SEQ ID NO: 392 | SEQ ID NO: 2758 | SEQ ID NO: 5124 |
| rs362531 | SEQ ID NO: 393 | SEQ ID NO: 2759 | SEQ ID NO: 5125 |
| rs6899851 | SEQ ID NO: 394 | SEQ ID NO: 2760 | SEQ ID NO: 5126 |
| rs4084091 | SEQ ID NO: 395 | SEQ ID NO: 2761 | SEQ ID NO: 5127 |
| rs2735097 | SEQ ID NO: 396 | SEQ ID NO: 2762 | SEQ ID NO: 5128 |
| rs1264698 | SEQ ID NO: 397 | SEQ ID NO: 2763 | SEQ ID NO: 5129 |
| rs2071789 | SEQ ID NO: 398 | SEQ ID NO: 2764 | SEQ ID NO: 5130 |
| rs3093544 | SEQ ID NO: 399 | SEQ ID NO: 2765 | SEQ ID NO: 5131 |
| rs3132130 | SEQ ID NO: 400 | SEQ ID NO: 2766 | SEQ ID NO: 5132 |
| rs3093669 | SEQ ID NO: 401 | SEQ ID NO: 2767 | SEQ ID NO: 5133 |
| rs2092305 | SEQ ID NO: 402 | SEQ ID NO: 2768 | SEQ ID NO: 5134 |
| rs3128927 | SEQ ID NO: 403 | SEQ ID NO: 2769 | SEQ ID NO: 5135 |
| rs1633009 | SEQ ID NO: 404 | SEQ ID NO: 2770 | SEQ ID NO: 5136 |
| rs6914878 | SEQ ID NO: 405 | SEQ ID NO: 2771 | SEQ ID NO: 5137 |
| rs8337 | SEQ ID NO: 406 | SEQ ID NO: 2772 | SEQ ID NO: 5138 |
| rs2286712 | SEQ ID NO: 407 | SEQ ID NO: 2773 | SEQ ID NO: 5139 |
| rs1633086 | SEQ ID NO: 408 | SEQ ID NO: 2774 | SEQ ID NO: 5140 |
| rs2245514 | SEQ ID NO: 409 | SEQ ID NO: 2775 | SEQ ID NO: 5141 |
| rs1265086 | SEQ ID NO: 410 | SEQ ID NO: 2776 | SEQ ID NO: 5142 |
| rs466384 | SEQ ID NO: 411 | SEQ ID NO: 2777 | SEQ ID NO: 5143 |
| rs3117225 | SEQ ID NO: 412 | SEQ ID NO: 2778 | SEQ ID NO: 5144 |
| rs209473 | SEQ ID NO: 413 | SEQ ID NO: 2779 | SEQ ID NO: 5145 |
| rs4151664 | SEQ ID NO: 414 | SEQ ID NO: 2780 | SEQ ID NO: 5146 |
| rs909967 | SEQ ID NO: 415 | SEQ ID NO: 2781 | SEQ ID NO: 5147 |
| rs1633013 | SEQ ID NO: 416 | SEQ ID NO: 2782 | SEQ ID NO: 5148 |
| rs4151657 | SEQ ID NO: 417 | SEQ ID NO: 2783 | SEQ ID NO: 5149 |
| rs1419689 | SEQ ID NO: 418 | SEQ ID NO: 2784 | SEQ ID NO: 5150 |
| rs3757333 | SEQ ID NO: 419 | SEQ ID NO: 2785 | SEQ ID NO: 5151 |
| rs1264541 | SEQ ID NO: 420 | SEQ ID NO: 2786 | SEQ ID NO: 5152 |
| rs7992 | SEQ ID NO: 421 | SEQ ID NO: 2787 | SEQ ID NO: 5153 |
| rs2523926 | SEQ ID NO: 422 | SEQ ID NO: 2788 | SEQ ID NO: 5154 |
| rs3823419 | SEQ ID NO: 423 | SEQ ID NO: 2789 | SEQ ID NO: 5155 |
| rs2735003 | SEQ ID NO: 424 | SEQ ID NO: 2790 | SEQ ID NO: 5156 |
| rs3817965 | SEQ ID NO: 425 | SEQ ID NO: 2791 | SEQ ID NO: 5157 |
| rs2076540 | SEQ ID NO: 426 | SEQ ID NO: 2792 | SEQ ID NO: 5158 |
| rs3998799 | SEQ ID NO: 427 | SEQ ID NO: 2793 | SEQ ID NO: 5159 |
| rs2428510 | SEQ ID NO: 428 | SEQ ID NO: 2794 | SEQ ID NO: 5160 |
| rs3094187 | SEQ ID NO: 429 | SEQ ID NO: 2795 | SEQ ID NO: 5161 |
| rs2076484 | SEQ ID NO: 430 | SEQ ID NO: 2796 | SEQ ID NO: 5162 |
| rs3763349 | SEQ ID NO: 431 | SEQ ID NO: 2797 | SEQ ID NO: 5163 |
| rs2523512 | SEQ ID NO: 432 | SEQ ID NO: 2798 | SEQ ID NO: 5164 |
| rs2517439 | SEQ ID NO: 433 | SEQ ID NO: 2799 | SEQ ID NO: 5165 |
| rs1419634 | SEQ ID NO: 434 | SEQ ID NO: 2800 | SEQ ID NO: 5166 |
| rs241438 | SEQ ID NO: 435 | SEQ ID NO: 2801 | SEQ ID NO: 5167 |
| rs2244839 | SEQ ID NO: 436 | SEQ ID NO: 2802 | SEQ ID NO: 5168 |
| rs3135033 | SEQ ID NO: 437 | SEQ ID NO: 2803 | SEQ ID NO: 5169 |
| rs3135388 | SEQ ID NO: 438 | SEQ ID NO: 2804 | SEQ ID NO: 5170 |
| rs3807033 | SEQ ID NO: 439 | SEQ ID NO: 2805 | SEQ ID NO: 5171 |
| rs4713446 | SEQ ID NO: 440 | SEQ ID NO: 2806 | SEQ ID NO: 5172 |
| rs3115608 | SEQ ID NO: 441 | SEQ ID NO: 2807 | SEQ ID NO: 5173 |
| rs1736994 | SEQ ID NO: 442 | SEQ ID NO: 2808 | SEQ ID NO: 5174 |
| rs6913309 | SEQ ID NO: 443 | SEQ ID NO: 2809 | SEQ ID NO: 5175 |
| rs6905408 | SEQ ID NO: 444 | SEQ ID NO: 2810 | SEQ ID NO: 5176 |
| rs3128917 | SEQ ID NO: 445 | SEQ ID NO: 2811 | SEQ ID NO: 5177 |
| rs6934041 | SEQ ID NO: 446 | SEQ ID NO: 2812 | SEQ ID NO: 5178 |
| rs6916248 | SEQ ID NO: 447 | SEQ ID NO: 2813 | SEQ ID NO: 5179 |
| rs5007263 | SEQ ID NO: 448 | SEQ ID NO: 2814 | SEQ ID NO: 5180 |
| rs3819300 | SEQ ID NO: 449 | SEQ ID NO: 2815 | SEQ ID NO: 5181 |
| rs2071471 | SEQ ID NO: 450 | SEQ ID NO: 2816 | SEQ ID NO: 5182 |
| rs2894179 | SEQ ID NO: 451 | SEQ ID NO: 2817 | SEQ ID NO: 5183 |
| rs2239705 | SEQ ID NO: 452 | SEQ ID NO: 2818 | SEQ ID NO: 5184 |
| rs2301220 | SEQ ID NO: 453 | SEQ ID NO: 2819 | SEQ ID NO: 5185 |
| rs2272904 | SEQ ID NO: 454 | SEQ ID NO: 2820 | SEQ ID NO: 5186 |
| rs6935418 | SEQ ID NO: 455 | SEQ ID NO: 2821 | SEQ ID NO: 5187 |
| rs5021450 | SEQ ID NO: 456 | SEQ ID NO: 2822 | SEQ ID NO: 5188 |
| rs2857103 | SEQ ID NO: 457 | SEQ ID NO: 2823 | SEQ ID NO: 5189 |
| rs2853953 | SEQ ID NO: 458 | SEQ ID NO: 2824 | SEQ ID NO: 5190 |
| rs757259 | SEQ ID NO: 459 | SEQ ID NO: 2825 | SEQ ID NO: 5191 |
| rs3135391 | SEQ ID NO: 460 | SEQ ID NO: 2826 | SEQ ID NO: 5192 |
| rs2523606 | SEQ ID NO: 461 | SEQ ID NO: 2827 | SEQ ID NO: 5193 |
| rs1632962 | SEQ ID NO: 462 | SEQ ID NO: 2828 | SEQ ID NO: 5194 |
| rs3135353 | SEQ ID NO: 463 | SEQ ID NO: 2829 | SEQ ID NO: 5195 |
| rs3130235 | SEQ ID NO: 464 | SEQ ID NO: 2830 | SEQ ID NO: 5196 |
| rs2394606 | SEQ ID NO: 465 | SEQ ID NO: 2831 | SEQ ID NO: 5197 |
| rs2734997 | SEQ ID NO: 466 | SEQ ID NO: 2832 | SEQ ID NO: 5198 |
| rs3998794 | SEQ ID NO: 467 | SEQ ID NO: 2833 | SEQ ID NO: 5199 |
| rs2844463 | SEQ ID NO: 468 | SEQ ID NO: 2834 | SEQ ID NO: 5200 |
| rs7452233 | SEQ ID NO: 469 | SEQ ID NO: 2835 | SEQ ID NO: 5201 |
| rs6910598 | SEQ ID NO: 470 | SEQ ID NO: 2836 | SEQ ID NO: 5202 |
| rs3129008 | SEQ ID NO: 471 | SEQ ID NO: 2837 | SEQ ID NO: 5203 |
| rs1150741 | SEQ ID NO: 472 | SEQ ID NO: 2838 | SEQ ID NO: 5204 |
| rs7774452 | SEQ ID NO: 473 | SEQ ID NO: 2839 | SEQ ID NO: 5205 |
| rs6911724 | SEQ ID NO: 474 | SEQ ID NO: 2840 | SEQ ID NO: 5206 |
| rs2294479 | SEQ ID NO: 475 | SEQ ID NO: 2841 | SEQ ID NO: 5207 |
| rs417374 | SEQ ID NO: 476 | SEQ ID NO: 2842 | SEQ ID NO: 5208 |
| rs1633030 | SEQ ID NO: 477 | SEQ ID NO: 2843 | SEQ ID NO: 5209 |
| rs2024679 | SEQ ID NO: 478 | SEQ ID NO: 2844 | SEQ ID NO: 5210 |
| rs3116999 | SEQ ID NO: 479 | SEQ ID NO: 2845 | SEQ ID NO: 5211 |
| rs3765605 | SEQ ID NO: 480 | SEQ ID NO: 2846 | SEQ ID NO: 5212 |
| rs2844603 | SEQ ID NO: 481 | SEQ ID NO: 2847 | SEQ ID NO: 5213 |
| rs2621419 | SEQ ID NO: 482 | SEQ ID NO: 2848 | SEQ ID NO: 5214 |
| rs1362073 | SEQ ID NO: 483 | SEQ ID NO: 2849 | SEQ ID NO: 5215 |
| rs2072634 | SEQ ID NO: 484 | SEQ ID NO: 2850 | SEQ ID NO: 5216 |
| rs213208 | SEQ ID NO: 485 | SEQ ID NO: 2851 | SEQ ID NO: 5217 |
| rs3956934 | SEQ ID NO: 486 | SEQ ID NO: 2852 | SEQ ID NO: 5218 |
| rs3117227 | SEQ ID NO: 487 | SEQ ID NO: 2853 | SEQ ID NO: 5219 |
| rs4713215 | SEQ ID NO: 488 | SEQ ID NO: 2854 | SEQ ID NO: 5220 |
| rs1632942 | SEQ ID NO: 489 | SEQ ID NO: 2855 | SEQ ID NO: 5221 |
| rs3129886 | SEQ ID NO: 490 | SEQ ID NO: 2856 | SEQ ID NO: 5222 |
| rs2071798 | SEQ ID NO: 491 | SEQ ID NO: 2857 | SEQ ID NO: 5223 |
| rs2523586 | SEQ ID NO: 492 | SEQ ID NO: 2858 | SEQ ID NO: 5224 |
| rs3117234 | SEQ ID NO: 493 | SEQ ID NO: 2859 | SEQ ID NO: 5225 |
| rs2071473 | SEQ ID NO: 494 | SEQ ID NO: 2860 | SEQ ID NO: 5226 |
| rs3094041 | SEQ ID NO: 495 | SEQ ID NO: 2861 | SEQ ID NO: 5227 |
| rs2596472 | SEQ ID NO: 496 | SEQ ID NO: 2862 | SEQ ID NO: 5228 |
| rs2213570 | SEQ ID NO: 497 | SEQ ID NO: 2863 | SEQ ID NO: 5229 |
| rs1736922 | SEQ ID NO: 498 | SEQ ID NO: 2864 | SEQ ID NO: 5230 |
| rs3129269 | SEQ ID NO: 499 | SEQ ID NO: 2865 | SEQ ID NO: 5231 |
| rs6920457 | SEQ ID NO: 500 | SEQ ID NO: 2866 | SEQ ID NO: 5232 |
| rs4711229 | SEQ ID NO: 501 | SEQ ID NO: 2867 | SEQ ID NO: 5233 |
| rs1799964 | SEQ ID NO: 502 | SEQ ID NO: 2868 | SEQ ID NO: 5234 |
| rs4959037 | SEQ ID NO: 503 | SEQ ID NO: 2869 | SEQ ID NO: 5235 |
| rs1611652 | SEQ ID NO: 504 | SEQ ID NO: 2870 | SEQ ID NO: 5236 |
| rs2071354 | SEQ ID NO: 505 | SEQ ID NO: 2871 | SEQ ID NO: 5237 |
| rs1737012 | SEQ ID NO: 506 | SEQ ID NO: 2872 | SEQ ID NO: 5238 |
| rs1988564 | SEQ ID NO: 507 | SEQ ID NO: 2873 | SEQ ID NO: 5239 |
| rs2071790 | SEQ ID NO: 508 | SEQ ID NO: 2874 | SEQ ID NO: 5240 |
| rs465151 | SEQ ID NO: 509 | SEQ ID NO: 2875 | SEQ ID NO: 5241 |
| rs1265759 | SEQ ID NO: 510 | SEQ ID NO: 2876 | SEQ ID NO: 5242 |
| rs2239701 | SEQ ID NO: 511 | SEQ ID NO: 2877 | SEQ ID NO: 5243 |
| rs3129883 | SEQ ID NO: 512 | SEQ ID NO: 2878 | SEQ ID NO: 5244 |
| rs2032502 | SEQ ID NO: 513 | SEQ ID NO: 2879 | SEQ ID NO: 5245 |
| rs3778612 | SEQ ID NO: 514 | SEQ ID NO: 2880 | SEQ ID NO: 5246 |
| rs2246871 | SEQ ID NO: 515 | SEQ ID NO: 2881 | SEQ ID NO: 5247 |
| rs2239707 | SEQ ID NO: 516 | SEQ ID NO: 2882 | SEQ ID NO: 5248 |
| rs2734916 | SEQ ID NO: 517 | SEQ ID NO: 2883 | SEQ ID NO: 5249 |
| rs2301753 | SEQ ID NO: 518 | SEQ ID NO: 2884 | SEQ ID NO: 5250 |
| rs2735042 | SEQ ID NO: 519 | SEQ ID NO: 2885 | SEQ ID NO: 5251 |
| rs3179375 | SEQ ID NO: 520 | SEQ ID NO: 2886 | SEQ ID NO: 5252 |
| rs3129869 | SEQ ID NO: 521 | SEQ ID NO: 2887 | SEQ ID NO: 5253 |
| rs7143 | SEQ ID NO: 522 | SEQ ID NO: 2888 | SEQ ID NO: 5254 |
| rs2068204 | SEQ ID NO: 523 | SEQ ID NO: 2889 | SEQ ID NO: 5255 |
| rs2745411 | SEQ ID NO: 524 | SEQ ID NO: 2890 | SEQ ID NO: 5256 |
| rs462093 | SEQ ID NO: 525 | SEQ ID NO: 2891 | SEQ ID NO: 5257 |
| rs3817966 | SEQ ID NO: 526 | SEQ ID NO: 2892 | SEQ ID NO: 5258 |
| rs2256919 | SEQ ID NO: 527 | SEQ ID NO: 2893 | SEQ ID NO: 5259 |
| rs3957010 | SEQ ID NO: 528 | SEQ ID NO: 2894 | SEQ ID NO: 5260 |
| rs1610710 | SEQ ID NO: 529 | SEQ ID NO: 2895 | SEQ ID NO: 5261 |
| rs2735067 | SEQ ID NO: 530 | SEQ ID NO: 2896 | SEQ ID NO: 5262 |
| rs3128963 | SEQ ID NO: 531 | SEQ ID NO: 2897 | SEQ ID NO: 5263 |
| rs7382938 | SEQ ID NO: 532 | SEQ ID NO: 2898 | SEQ ID NO: 5264 |
| rs3828901 | SEQ ID NO: 533 | SEQ ID NO: 2899 | SEQ ID NO: 5265 |
| rs3131043 | SEQ ID NO: 534 | SEQ ID NO: 2900 | SEQ ID NO: 5266 |
| rs2107197 | SEQ ID NO: 535 | SEQ ID NO: 2901 | SEQ ID NO: 5267 |
| rs3106190 | SEQ ID NO: 536 | SEQ ID NO: 2902 | SEQ ID NO: 5268 |
| rs1633102 | SEQ ID NO: 537 | SEQ ID NO: 2903 | SEQ ID NO: 5269 |
| rs3117120 | SEQ ID NO: 538 | SEQ ID NO: 2904 | SEQ ID NO: 5270 |
| rs4713610 | SEQ ID NO: 539 | SEQ ID NO: 2905 | SEQ ID NO: 5271 |
| rs2076522 | SEQ ID NO: 540 | SEQ ID NO: 2906 | SEQ ID NO: 5272 |
| rs2853937 | SEQ ID NO: 541 | SEQ ID NO: 2907 | SEQ ID NO: 5273 |
| rs887464 | SEQ ID NO: 542 | SEQ ID NO: 2908 | SEQ ID NO: 5274 |
| rs2074466 | SEQ ID NO: 543 | SEQ ID NO: 2909 | SEQ ID NO: 5275 |
| rs7382649 | SEQ ID NO: 544 | SEQ ID NO: 2910 | SEQ ID NO: 5276 |
| rs7452209 | SEQ ID NO: 545 | SEQ ID NO: 2911 | SEQ ID NO: 5277 |
| rs5007238 | SEQ ID NO: 546 | SEQ ID NO: 2912 | SEQ ID NO: 5278 |
| rs757262 | SEQ ID NO: 547 | SEQ ID NO: 2913 | SEQ ID NO: 5279 |
| rs1611407 | SEQ ID NO: 548 | SEQ ID NO: 2914 | SEQ ID NO: 5280 |
| rs1655937 | SEQ ID NO: 549 | SEQ ID NO: 2915 | SEQ ID NO: 5281 |
| rs2269704 | SEQ ID NO: 550 | SEQ ID NO: 2916 | SEQ ID NO: 5282 |
| rs2734331 | SEQ ID NO: 551 | SEQ ID NO: 2917 | SEQ ID NO: 5283 |
| rs3998178 | SEQ ID NO: 552 | SEQ ID NO: 2918 | SEQ ID NO: 5284 |
| rs885914 | SEQ ID NO: 553 | SEQ ID NO: 2919 | SEQ ID NO: 5285 |
| rs6925041 | SEQ ID NO: 554 | SEQ ID NO: 2920 | SEQ ID NO: 5286 |
| rs441126 | SEQ ID NO: 555 | SEQ ID NO: 2921 | SEQ ID NO: 5287 |
| rs2394604 | SEQ ID NO: 556 | SEQ ID NO: 2922 | SEQ ID NO: 5288 |
| rs2074502 | SEQ ID NO: 557 | SEQ ID NO: 2923 | SEQ ID NO: 5289 |
| rs3815100 | SEQ ID NO: 558 | SEQ ID NO: 2924 | SEQ ID NO: 5290 |
| rs1632932 | SEQ ID NO: 559 | SEQ ID NO: 2925 | SEQ ID NO: 5291 |
| rs2076524 | SEQ ID NO: 560 | SEQ ID NO: 2926 | SEQ ID NO: 5292 |
| rs7759127 | SEQ ID NO: 561 | SEQ ID NO: 2927 | SEQ ID NO: 5293 |
| rs3765606 | SEQ ID NO: 562 | SEQ ID NO: 2928 | SEQ ID NO: 5294 |
| rs7381988 | SEQ ID NO: 563 | SEQ ID NO: 2929 | SEQ ID NO: 5295 |
| rs2071479 | SEQ ID NO: 564 | SEQ ID NO: 2930 | SEQ ID NO: 5296 |
| rs4986978 | SEQ ID NO: 565 | SEQ ID NO: 2931 | SEQ ID NO: 5297 |
| rs2071472 | SEQ ID NO: 566 | SEQ ID NO: 2932 | SEQ ID NO: 5298 |
| rs7349863 | SEQ ID NO: 567 | SEQ ID NO: 2933 | SEQ ID NO: 5299 |
| rs3093665 | SEQ ID NO: 568 | SEQ ID NO: 2934 | SEQ ID NO: 5300 |
| rs3132132 | SEQ ID NO: 569 | SEQ ID NO: 2935 | SEQ ID NO: 5301 |
| rs3823318 | SEQ ID NO: 570 | SEQ ID NO: 2936 | SEQ ID NO: 5302 |
| rs2106072 | SEQ ID NO: 571 | SEQ ID NO: 2937 | SEQ ID NO: 5303 |
| rs3130654 | SEQ ID NO: 572 | SEQ ID NO: 2938 | SEQ ID NO: 5304 |
| rs2857130 | SEQ ID NO: 573 | SEQ ID NO: 2939 | SEQ ID NO: 5305 |
| rs1264300 | SEQ ID NO: 574 | SEQ ID NO: 2940 | SEQ ID NO: 5306 |
| rs909727 | SEQ ID NO: 575 | SEQ ID NO: 2941 | SEQ ID NO: 5307 |
| rs4151670 | SEQ ID NO: 576 | SEQ ID NO: 2942 | SEQ ID NO: 5308 |
| rs1419637 | SEQ ID NO: 577 | SEQ ID NO: 2943 | SEQ ID NO: 5309 |
| rs2532934 | SEQ ID NO: 578 | SEQ ID NO: 2944 | SEQ ID NO: 5310 |
| rs1632981 | SEQ ID NO: 579 | SEQ ID NO: 2945 | SEQ ID NO: 5311 |
| rs7383287 | SEQ ID NO: 580 | SEQ ID NO: 2946 | SEQ ID NO: 5312 |
| rs2071477 | SEQ ID NO: 581 | SEQ ID NO: 2947 | SEQ ID NO: 5313 |
| rs2071652 | SEQ ID NO: 582 | SEQ ID NO: 2948 | SEQ ID NO: 5314 |
| rs7756516 | SEQ ID NO: 583 | SEQ ID NO: 2949 | SEQ ID NO: 5315 |
| rs2734981 | SEQ ID NO: 584 | SEQ ID NO: 2950 | SEQ ID NO: 5316 |
| rs3823339 | SEQ ID NO: 585 | SEQ ID NO: 2951 | SEQ ID NO: 5317 |
| rs7770557 | SEQ ID NO: 586 | SEQ ID NO: 2952 | SEQ ID NO: 5318 |
| rs1054175 | SEQ ID NO: 587 | SEQ ID NO: 2953 | SEQ ID NO: 5319 |
| rs3131786 | SEQ ID NO: 588 | SEQ ID NO: 2954 | SEQ ID NO: 5320 |
| rs2844686 | SEQ ID NO: 589 | SEQ ID NO: 2955 | SEQ ID NO: 5321 |
| rs1611653 | SEQ ID NO: 590 | SEQ ID NO: 2956 | SEQ ID NO: 5322 |
| rs2242655 | SEQ ID NO: 591 | SEQ ID NO: 2957 | SEQ ID NO: 5323 |
| rs969891 | SEQ ID NO: 592 | SEQ ID NO: 2958 | SEQ ID NO: 5324 |
| rs2023609 | SEQ ID NO: 593 | SEQ ID NO: 2959 | SEQ ID NO: 5325 |
| rs3129882 | SEQ ID NO: 594 | SEQ ID NO: 2960 | SEQ ID NO: 5326 |
| rs3132553 | SEQ ID NO: 595 | SEQ ID NO: 2961 | SEQ ID NO: 5327 |
| rs2233956 | SEQ ID NO: 596 | SEQ ID NO: 2962 | SEQ ID NO: 5328 |
| rs3128930 | SEQ ID NO: 597 | SEQ ID NO: 2963 | SEQ ID NO: 5329 |
| rs3130560 | SEQ ID NO: 598 | SEQ ID NO: 2964 | SEQ ID NO: 5330 |
| rs1042141 | SEQ ID NO: 599 | SEQ ID NO: 2965 | SEQ ID NO: 5331 |
| rs2256543 | SEQ ID NO: 600 | SEQ ID NO: 2966 | SEQ ID NO: 5332 |
| rs2071362 | SEQ ID NO: 601 | SEQ ID NO: 2967 | SEQ ID NO: 5333 |
| rs4711313 | SEQ ID NO: 602 | SEQ ID NO: 2968 | SEQ ID NO: 5334 |
| rs916568 | SEQ ID NO: 603 | SEQ ID NO: 2969 | SEQ ID NO: 5335 |
| rs4988889 | SEQ ID NO: 604 | SEQ ID NO: 2970 | SEQ ID NO: 5336 |
| rs3132524 | SEQ ID NO: 605 | SEQ ID NO: 2971 | SEQ ID NO: 5337 |
| rs1033569 | SEQ ID NO: 606 | SEQ ID NO: 2972 | SEQ ID NO: 5338 |
| rs4713242 | SEQ ID NO: 607 | SEQ ID NO: 2973 | SEQ ID NO: 5339 |
| rs3095334 | SEQ ID NO: 608 | SEQ ID NO: 2974 | SEQ ID NO: 5340 |
| rs2844666 | SEQ ID NO: 609 | SEQ ID NO: 2975 | SEQ ID NO: 5341 |
| rs2517671 | SEQ ID NO: 610 | SEQ ID NO: 2976 | SEQ ID NO: 5342 |
| rs6903130 | SEQ ID NO: 611 | SEQ ID NO: 2977 | SEQ ID NO: 5343 |
| rs2179919 | SEQ ID NO: 612 | SEQ ID NO: 2978 | SEQ ID NO: 5344 |
| rs2233984 | SEQ ID NO: 613 | SEQ ID NO: 2979 | SEQ ID NO: 5345 |
| rs3117574 | SEQ ID NO: 614 | SEQ ID NO: 2980 | SEQ ID NO: 5346 |
| rs356969 | SEQ ID NO: 615 | SEQ ID NO: 2981 | SEQ ID NO: 5347 |
| rs3128972 | SEQ ID NO: 616 | SEQ ID NO: 2982 | SEQ ID NO: 5348 |
| rs4084093 | SEQ ID NO: 617 | SEQ ID NO: 2983 | SEQ ID NO: 5349 |
| rs805262 | SEQ ID NO: 618 | SEQ ID NO: 2984 | SEQ ID NO: 5350 |
| rs2269555 | SEQ ID NO: 619 | SEQ ID NO: 2985 | SEQ ID NO: 5351 |
| rs3095298 | SEQ ID NO: 620 | SEQ ID NO: 2986 | SEQ ID NO: 5352 |
| rs189865 | SEQ ID NO: 621 | SEQ ID NO: 2987 | SEQ ID NO: 5353 |
| rs3130991 | SEQ ID NO: 622 | SEQ ID NO: 2988 | SEQ ID NO: 5354 |
| rs1061235 | SEQ ID NO: 623 | SEQ ID NO: 2989 | SEQ ID NO: 5355 |
| rs3823421 | SEQ ID NO: 624 | SEQ ID NO: 2990 | SEQ ID NO: 5356 |
| rs4079877 | SEQ ID NO: 625 | SEQ ID NO: 2991 | SEQ ID NO: 5357 |
| rs909968 | SEQ ID NO: 626 | SEQ ID NO: 2992 | SEQ ID NO: 5358 |
| rs3218807 | SEQ ID NO: 627 | SEQ ID NO: 2993 | SEQ ID NO: 5359 |
| rs760293 | SEQ ID NO: 628 | SEQ ID NO: 2994 | SEQ ID NO: 5360 |
| rs5026743 | SEQ ID NO: 629 | SEQ ID NO: 2995 | SEQ ID NO: 5361 |
| rs2213586 | SEQ ID NO: 630 | SEQ ID NO: 2996 | SEQ ID NO: 5362 |
| rs3132709 | SEQ ID NO: 631 | SEQ ID NO: 2997 | SEQ ID NO: 5363 |
| rs805287 | SEQ ID NO: 632 | SEQ ID NO: 2998 | SEQ ID NO: 5364 |
| rs391755 | SEQ ID NO: 633 | SEQ ID NO: 2999 | SEQ ID NO: 5365 |
| rs3765604 | SEQ ID NO: 634 | SEQ ID NO: 3000 | SEQ ID NO: 5366 |
| rs1265087 | SEQ ID NO: 635 | SEQ ID NO: 3001 | SEQ ID NO: 5367 |
| rs516535 | SEQ ID NO: 636 | SEQ ID NO: 3002 | SEQ ID NO: 5368 |
| rs1632883 | SEQ ID NO: 637 | SEQ ID NO: 3003 | SEQ ID NO: 5369 |
| rs7740076 | SEQ ID NO: 638 | SEQ ID NO: 3004 | SEQ ID NO: 5370 |
| rs10885 | SEQ ID NO: 639 | SEQ ID NO: 3005 | SEQ ID NO: 5371 |
| rs1042149 | SEQ ID NO: 640 | SEQ ID NO: 3006 | SEQ ID NO: 5372 |
| rs3129859 | SEQ ID NO: 641 | SEQ ID NO: 3007 | SEQ ID NO: 5373 |
| rs362546 | SEQ ID NO: 642 | SEQ ID NO: 3008 | SEQ ID NO: 5374 |
| rs1633057 | SEQ ID NO: 643 | SEQ ID NO: 3009 | SEQ ID NO: 5375 |
| rs3807032 | SEQ ID NO: 644 | SEQ ID NO: 3010 | SEQ ID NO: 5376 |
| rs3130212 | SEQ ID NO: 645 | SEQ ID NO: 3011 | SEQ ID NO: 5377 |
| rs423639 | SEQ ID NO: 646 | SEQ ID NO: 3012 | SEQ ID NO: 5378 |
| rs3135000 | SEQ ID NO: 647 | SEQ ID NO: 3013 | SEQ ID NO: 5379 |
| rs1264620 | SEQ ID NO: 648 | SEQ ID NO: 3014 | SEQ ID NO: 5380 |
| rs1264703 | SEQ ID NO: 649 | SEQ ID NO: 3015 | SEQ ID NO: 5381 |
| rs1465651 | SEQ ID NO: 650 | SEQ ID NO: 3016 | SEQ ID NO: 5382 |
| rs7194 | SEQ ID NO: 651 | SEQ ID NO: 3017 | SEQ ID NO: 5383 |
| rs213210 | SEQ ID NO: 652 | SEQ ID NO: 3018 | SEQ ID NO: 5384 |
| rs2256028 | SEQ ID NO: 653 | SEQ ID NO: 3019 | SEQ ID NO: 5385 |
| rs762815 | SEQ ID NO: 654 | SEQ ID NO: 3020 | SEQ ID NO: 5386 |
| rs3868542 | SEQ ID NO: 655 | SEQ ID NO: 3021 | SEQ ID NO: 5387 |
| rs5021449 | SEQ ID NO: 656 | SEQ ID NO: 3022 | SEQ ID NO: 5388 |
| rs1632880 | SEQ ID NO: 657 | SEQ ID NO: 3023 | SEQ ID NO: 5389 |
| rs7774954 | SEQ ID NO: 658 | SEQ ID NO: 3024 | SEQ ID NO: 5390 |
| rs4713520 | SEQ ID NO: 659 | SEQ ID NO: 3025 | SEQ ID NO: 5391 |
| rs6456895 | SEQ ID NO: 660 | SEQ ID NO: 3026 | SEQ ID NO: 5392 |
| rs463302 | SEQ ID NO: 661 | SEQ ID NO: 3027 | SEQ ID NO: 5393 |
| rs1265100 | SEQ ID NO: 662 | SEQ ID NO: 3028 | SEQ ID NO: 5394 |
| rs3828875 | SEQ ID NO: 663 | SEQ ID NO: 3029 | SEQ ID NO: 5395 |
| rs6917517 | SEQ ID NO: 664 | SEQ ID NO: 3030 | SEQ ID NO: 5396 |
| rs3888777 | SEQ ID NO: 665 | SEQ ID NO: 3031 | SEQ ID NO: 5397 |
| rs7769979 | SEQ ID NO: 666 | SEQ ID NO: 3032 | SEQ ID NO: 5398 |
| rs3129931 | SEQ ID NO: 667 | SEQ ID NO: 3033 | SEQ ID NO: 5399 |
| rs3868086 | SEQ ID NO: 668 | SEQ ID NO: 3034 | SEQ ID NO: 5400 |
| rs7773068 | SEQ ID NO: 669 | SEQ ID NO: 3035 | SEQ ID NO: 5401 |
| rs3778638 | SEQ ID NO: 670 | SEQ ID NO: 3036 | SEQ ID NO: 5402 |
| rs3130843 | SEQ ID NO: 671 | SEQ ID NO: 3037 | SEQ ID NO: 5403 |
| rs3885028 | SEQ ID NO: 672 | SEQ ID NO: 3038 | SEQ ID NO: 5404 |
| rs3757327 | SEQ ID NO: 673 | SEQ ID NO: 3039 | SEQ ID NO: 5405 |
| rs29225 | SEQ ID NO: 674 | SEQ ID NO: 3040 | SEQ ID NO: 5406 |
| rs885937 | SEQ ID NO: 675 | SEQ ID NO: 3041 | SEQ ID NO: 5407 |
| rs3129702 | SEQ ID NO: 676 | SEQ ID NO: 3042 | SEQ ID NO: 5408 |
| rs3128968 | SEQ ID NO: 677 | SEQ ID NO: 3043 | SEQ ID NO: 5409 |
| rs4713327 | SEQ ID NO: 678 | SEQ ID NO: 3044 | SEQ ID NO: 5410 |
| rs987870 | SEQ ID NO: 679 | SEQ ID NO: 3045 | SEQ ID NO: 5411 |
| rs7772410 | SEQ ID NO: 680 | SEQ ID NO: 3046 | SEQ ID NO: 5412 |
| rs3998790 | SEQ ID NO: 681 | SEQ ID NO: 3047 | SEQ ID NO: 5413 |
| rs733841 | SEQ ID NO: 682 | SEQ ID NO: 3048 | SEQ ID NO: 5414 |
| rs6916716 | SEQ ID NO: 683 | SEQ ID NO: 3049 | SEQ ID NO: 5415 |
| rs2395313 | SEQ ID NO: 684 | SEQ ID NO: 3050 | SEQ ID NO: 5416 |
| rs774400 | SEQ ID NO: 685 | SEQ ID NO: 3051 | SEQ ID NO: 5417 |
| rs3757329 | SEQ ID NO: 686 | SEQ ID NO: 3052 | SEQ ID NO: 5418 |
| rs6933135 | SEQ ID NO: 687 | SEQ ID NO: 3053 | SEQ ID NO: 5419 |
| rs4713217 | SEQ ID NO: 688 | SEQ ID NO: 3054 | SEQ ID NO: 5420 |
| rs3130198 | SEQ ID NO: 689 | SEQ ID NO: 3055 | SEQ ID NO: 5421 |
| rs5027459 | SEQ ID NO: 690 | SEQ ID NO: 3056 | SEQ ID NO: 5422 |
| rs2747430 | SEQ ID NO: 691 | SEQ ID NO: 3057 | SEQ ID NO: 5423 |
| rs4248158 | SEQ ID NO: 692 | SEQ ID NO: 3058 | SEQ ID NO: 5424 |
| rs2301227 | SEQ ID NO: 693 | SEQ ID NO: 3059 | SEQ ID NO: 5425 |
| rs3668 | SEQ ID NO: 694 | SEQ ID NO: 3060 | SEQ ID NO: 5426 |
| rs1233426 | SEQ ID NO: 695 | SEQ ID NO: 3061 | SEQ ID NO: 5427 |
| rs3094093 | SEQ ID NO: 696 | SEQ ID NO: 3062 | SEQ ID NO: 5428 |
| rs422951 | SEQ ID NO: 697 | SEQ ID NO: 3063 | SEQ ID NO: 5429 |
| rs909729 | SEQ ID NO: 698 | SEQ ID NO: 3064 | SEQ ID NO: 5430 |
| rs2534673 | SEQ ID NO: 699 | SEQ ID NO: 3065 | SEQ ID NO: 5431 |
| rs6928482 | SEQ ID NO: 700 | SEQ ID NO: 3066 | SEQ ID NO: 5432 |
| rs707938 | SEQ ID NO: 701 | SEQ ID NO: 3067 | SEQ ID NO: 5433 |
| rs2844521 | SEQ ID NO: 702 | SEQ ID NO: 3068 | SEQ ID NO: 5434 |
| rs3 868075 | SEQ ID NO: 703 | SEQ ID NO: 3069 | SEQ ID NO: 5435 |
| rs7766843 | SEQ ID NO: 704 | SEQ ID NO: 3070 | SEQ ID NO: 5436 |
| rs4151651 | SEQ ID NO: 705 | SEQ ID NO: 3071 | SEQ ID NO: 5437 |
| rs2394609 | SEQ ID NO: 706 | SEQ ID NO: 3072 | SEQ ID NO: 5438 |
| rs2239805 | SEQ ID NO: 707 | SEQ ID NO: 3073 | SEQ ID NO: 5439 |
| rs5007260 | SEQ ID NO: 708 | SEQ ID NO: 3074 | SEQ ID NO: 5440 |
| rs2073044 | SEQ ID NO: 709 | SEQ ID NO: 3075 | SEQ ID NO: 5441 |
| rs3765608 | SEQ ID NO: 710 | SEQ ID NO: 3076 | SEQ ID NO: 5442 |
| rs769176 | SEQ ID NO: 711 | SEQ ID NO: 3077 | SEQ ID NO: 5443 |
| rs7773694 | SEQ ID NO: 712 | SEQ ID NO: 3078 | SEQ ID NO: 5444 |
| rs3128935 | SEQ ID NO: 713 | SEQ ID NO: 3079 | SEQ ID NO: 5445 |
| rs2853950 | SEQ ID NO: 714 | SEQ ID NO: 3080 | SEQ ID NO: 5446 |
| rs494620 | SEQ ID NO: 715 | SEQ ID NO: 3081 | SEQ ID NO: 5447 |
| rs1633089 | SEQ ID NO: 716 | SEQ ID NO: 3082 | SEQ ID NO: 5448 |
| rs2267642 | SEQ ID NO: 717 | SEQ ID NO: 3083 | SEQ ID NO: 5449 |
| rs2259571 | SEQ ID NO: 718 | SEQ ID NO: 3084 | SEQ ID NO: 5450 |
| rs1557608 | SEQ ID NO: 719 | SEQ ID NO: 3085 | SEQ ID NO: 5451 |
| rs2530708 | SEQ ID NO: 720 | SEQ ID NO: 3086 | SEQ ID NO: 5452 |
| rs7769930 | SEQ ID NO: 721 | SEQ ID NO: 3087 | SEQ ID NO: 5453 |
| rs2097274 | SEQ ID NO: 722 | SEQ ID NO: 3088 | SEQ ID NO: 5454 |
| rs422878 | SEQ ID NO: 723 | SEQ ID NO: 3089 | SEQ ID NO: 5455 |
| rs6457643 | SEQ ID NO: 724 | SEQ ID NO: 3090 | SEQ ID NO: 5456 |
| rs7381617 | SEQ ID NO: 725 | SEQ ID NO: 3091 | SEQ ID NO: 5457 |
| rs3129270 | SEQ ID NO: 726 | SEQ ID NO: 3092 | SEQ ID NO: 5458 |
| rs1632914 | SEQ ID NO: 727 | SEQ ID NO: 3093 | SEQ ID NO: 5459 |
| rs3129808 | SEQ ID NO: 728 | SEQ ID NO: 3094 | SEQ ID NO: 5460 |
| rs4713604 | SEQ ID NO: 729 | SEQ ID NO: 3095 | SEQ ID NO: 5461 |
| rs241436 | SEQ ID NO: 730 | SEQ ID NO: 3096 | SEQ ID NO: 5462 |
| rs3132555 | SEQ ID NO: 731 | SEQ ID NO: 3097 | SEQ ID NO: 5463 |
| rs2517461 | SEQ ID NO: 732 | SEQ ID NO: 3098 | SEQ ID NO: 5464 |
| rs5021448 | SEQ ID NO: 733 | SEQ ID NO: 3099 | SEQ ID NO: 5465 |
| rs4122198 | SEQ ID NO: 734 | SEQ ID NO: 3100 | SEQ ID NO: 5466 |
| rs2227134 | SEQ ID NO: 735 | SEQ ID NO: 3101 | SEQ ID NO: 5467 |
| rs4713605 | SEQ ID NO: 736 | SEQ ID NO: 3102 | SEQ ID NO: 5468 |
| rs1265158 | SEQ ID NO: 737 | SEQ ID NO: 3103 | SEQ ID NO: 5469 |
| rs3135382 | SEQ ID NO: 738 | SEQ ID NO: 3104 | SEQ ID NO: 5470 |
| rs3129701 | SEQ ID NO: 739 | SEQ ID NO: 3105 | SEQ ID NO: 5471 |
| rs2244546 | SEQ ID NO: 740 | SEQ ID NO: 3106 | SEQ ID NO: 5472 |
| rs2395175 | SEQ ID NO: 741 | SEQ ID NO: 3107 | SEQ ID NO: 5473 |
| rs2844793 | SEQ ID NO: 742 | SEQ ID NO: 3108 | SEQ ID NO: 5474 |
| rs2395327 | SEQ ID NO: 743 | SEQ ID NO: 3109 | SEQ ID NO: 5475 |
| rs1265074 | SEQ ID NO: 744 | SEQ ID NO: 3110 | SEQ ID NO: 5476 |
| rs3117228 | SEQ ID NO: 745 | SEQ ID NO: 3111 | SEQ ID NO: 5477 |
| rs429479 | SEQ ID NO: 746 | SEQ ID NO: 3112 | SEQ ID NO: 5478 |
| rs1634720 | SEQ ID NO: 747 | SEQ ID NO: 3113 | SEQ ID NO: 5479 |
| rs3095302 | SEQ ID NO: 748 | SEQ ID NO: 3114 | SEQ ID NO: 5480 |
| rs423023 | SEQ ID NO: 749 | SEQ ID NO: 3115 | SEQ ID NO: 5481 |
| rs6456880 | SEQ ID NO: 750 | SEQ ID NO: 3116 | SEQ ID NO: 5482 |
| rs1065461 | SEQ ID NO: 751 | SEQ ID NO: 3117 | SEQ ID NO: 5483 |
| rs6923313 | SEQ ID NO: 752 | SEQ ID NO: 3118 | SEQ ID NO: 5484 |
| rs1367730 | SEQ ID NO: 753 | SEQ ID NO: 3119 | SEQ ID NO: 5485 |
| rs1800629 | SEQ ID NO: 754 | SEQ ID NO: 3120 | SEQ ID NO: 5486 |
| rs2240070 | SEQ ID NO: 755 | SEQ ID NO: 3121 | SEQ ID NO: 5487 |
| rs520803 | SEQ ID NO: 756 | SEQ ID NO: 3122 | SEQ ID NO: 5488 |
| rs3734836 | SEQ ID NO: 757 | SEQ ID NO: 3123 | SEQ ID NO: 5489 |
| rs3132468 | SEQ ID NO: 758 | SEQ ID NO: 3124 | SEQ ID NO: 5490 |
| rs3094159 | SEQ ID NO: 759 | SEQ ID NO: 3125 | SEQ ID NO: 5491 |
| rs3180665 | SEQ ID NO: 760 | SEQ ID NO: 3126 | SEQ ID NO: 5492 |
| rs2518027 | SEQ ID NO: 761 | SEQ ID NO: 3127 | SEQ ID NO: 5493 |
| rs1362068 | SEQ ID NO: 762 | SEQ ID NO: 3128 | SEQ ID NO: 5494 |
| rs1264542 | SEQ ID NO: 763 | SEQ ID NO: 3129 | SEQ ID NO: 5495 |
| rs2223638 | SEQ ID NO: 764 | SEQ ID NO: 3130 | SEQ ID NO: 5496 |
| rs2281390 | SEQ ID NO: 765 | SEQ ID NO: 3131 | SEQ ID NO: 5497 |
| rs1265094 | SEQ ID NO: 766 | SEQ ID NO: 3132 | SEQ ID NO: 5498 |
| rs2523994 | SEQ ID NO: 767 | SEQ ID NO: 3133 | SEQ ID NO: 5499 |
| rs2857129 | SEQ ID NO: 768 | SEQ ID NO: 3134 | SEQ ID NO: 5500 |
| rs886403 | SEQ ID NO: 769 | SEQ ID NO: 3135 | SEQ ID NO: 5501 |
| rs2213565 | SEQ ID NO: 770 | SEQ ID NO: 3136 | SEQ ID NO: 5502 |
| rs1419658 | SEQ ID NO: 771 | SEQ ID NO: 3137 | SEQ ID NO: 5503 |
| rs2022109 | SEQ ID NO: 772 | SEQ ID NO: 3138 | SEQ ID NO: 5504 |
| rs3128928 | SEQ ID NO: 773 | SEQ ID NO: 3139 | SEQ ID NO: 5505 |
| rs707913 | SEQ ID NO: 774 | SEQ ID NO: 3140 | SEQ ID NO: 5506 |
| rs2027856 | SEQ ID NO: 775 | SEQ ID NO: 3141 | SEQ ID NO: 5507 |
| rs2747454 | SEQ ID NO: 776 | SEQ ID NO: 3142 | SEQ ID NO: 5508 |
| rs3132552 | SEQ ID NO: 777 | SEQ ID NO: 3143 | SEQ ID NO: 5509 |
| rs3130989 | SEQ ID NO: 778 | SEQ ID NO: 3144 | SEQ ID NO: 5510 |
| rs3817964 | SEQ ID NO: 779 | SEQ ID NO: 3145 | SEQ ID NO: 5511 |
| rs154971 | SEQ ID NO: 780 | SEQ ID NO: 3146 | SEQ ID NO: 5512 |
| rs4713326 | SEQ ID NO: 781 | SEQ ID NO: 3147 | SEQ ID NO: 5513 |
| rs3132499 | SEQ ID NO: 782 | SEQ ID NO: 3148 | SEQ ID NO: 5514 |
| rs2395318 | SEQ ID NO: 783 | SEQ ID NO: 3149 | SEQ ID NO: 5515 |
| rs3823343 | SEQ ID NO: 784 | SEQ ID NO: 3150 | SEQ ID NO: 5516 |
| rs2071463 | SEQ ID NO: 785 | SEQ ID NO: 3151 | SEQ ID NO: 5517 |
| rs2857770 | SEQ ID NO: 786 | SEQ ID NO: 3152 | SEQ ID NO: 5518 |
| rs4248154 | SEQ ID NO: 787 | SEQ ID NO: 3153 | SEQ ID NO: 5519 |
| rs3132595 | SEQ ID NO: 788 | SEQ ID NO: 3154 | SEQ ID NO: 5520 |
| rs3749970 | SEQ ID NO: 789 | SEQ ID NO: 3155 | SEQ ID NO: 5521 |
| rs541862 | SEQ ID NO: 790 | SEQ ID NO: 3156 | SEQ ID NO: 5522 |
| rs2075582 | SEQ ID NO: 791 | SEQ ID NO: 3157 | SEQ ID NO: 5523 |
| rs2854048 | SEQ ID NO: 792 | SEQ ID NO: 3158 | SEQ ID NO: 5524 |
| rs1557607 | SEQ ID NO: 793 | SEQ ID NO: 3159 | SEQ ID NO: 5525 |
| rs1362070 | SEQ ID NO: 794 | SEQ ID NO: 3160 | SEQ ID NO: 5526 |
| rs2621337 | SEQ ID NO: 795 | SEQ ID NO: 3161 | SEQ ID NO: 5527 |
| rs3807030 | SEQ ID NO: 796 | SEQ ID NO: 3162 | SEQ ID NO: 5528 |
| rs2596502 | SEQ ID NO: 797 | SEQ ID NO: 3163 | SEQ ID NO: 5529 |
| rs2076530 | SEQ ID NO: 798 | SEQ ID NO: 3164 | SEQ ID NO: 5530 |
| rs885932 | SEQ ID NO: 799 | SEQ ID NO: 3165 | SEQ ID NO: 5531 |
| rs2517598 | SEQ ID NO: 800 | SEQ ID NO: 3166 | SEQ ID NO: 5532 |
| rs2524079 | SEQ ID NO: 801 | SEQ ID NO: 3167 | SEQ ID NO: 5533 |
| rs4286818 | SEQ ID NO: 802 | SEQ ID NO: 3168 | SEQ ID NO: 5534 |
| rs4151650 | SEQ ID NO: 803 | SEQ ID NO: 3169 | SEQ ID NO: 5535 |
| rs2523933 | SEQ ID NO: 804 | SEQ ID NO: 3170 | SEQ ID NO: 5536 |
| rs194675 | SEQ ID NO: 805 | SEQ ID NO: 3171 | SEQ ID NO: 5537 |
| rs3130615 | SEQ ID NO: 806 | SEQ ID NO: 3172 | SEQ ID NO: 5538 |
| rs2050188 | SEQ ID NO: 807 | SEQ ID NO: 3173 | SEQ ID NO: 5539 |
| rs2395173 | SEQ ID NO: 808 | SEQ ID NO: 3174 | SEQ ID NO: 5540 |
| rs1573299 | SEQ ID NO: 809 | SEQ ID NO: 3175 | SEQ ID NO: 5541 |
| rs417812 | SEQ ID NO: 810 | SEQ ID NO: 3176 | SEQ ID NO: 5542 |
| rs1633029 | SEQ ID NO: 811 | SEQ ID NO: 3177 | SEQ ID NO: 5543 |
| rs7454158 | SEQ ID NO: 812 | SEQ ID NO: 3178 | SEQ ID NO: 5544 |
| rs2516670 | SEQ ID NO: 813 | SEQ ID NO: 3179 | SEQ ID NO: 5545 |
| rs4151652 | SEQ ID NO: 814 | SEQ ID NO: 3180 | SEQ ID NO: 5546 |
| rs5026741 | SEQ ID NO: 815 | SEQ ID NO: 3181 | SEQ ID NO: 5547 |
| rs2158286 | SEQ ID NO: 816 | SEQ ID NO: 3182 | SEQ ID NO: 5548 |
| rs1051790 | SEQ ID NO: 817 | SEQ ID NO: 3183 | SEQ ID NO: 5549 |
| rs3828799 | SEQ ID NO: 818 | SEQ ID NO: 3184 | SEQ ID NO: 5550 |
| rs1737005 | SEQ ID NO: 819 | SEQ ID NO: 3185 | SEQ ID NO: 5551 |
| rs3132946 | SEQ ID NO: 820 | SEQ ID NO: 3186 | SEQ ID NO: 5552 |
| rs3132467 | SEQ ID NO: 821 | SEQ ID NO: 3187 | SEQ ID NO: 5553 |
| rs2076542 | SEQ ID NO: 822 | SEQ ID NO: 3188 | SEQ ID NO: 5554 |
| rs3828882 | SEQ ID NO: 823 | SEQ ID NO: 3189 | SEQ ID NO: 5555 |
| rs3094717 | SEQ ID NO: 824 | SEQ ID NO: 3190 | SEQ ID NO: 5556 |
| rs3094214 | SEQ ID NO: 825 | SEQ ID NO: 3191 | SEQ ID NO: 5557 |
| rs2734984 | SEQ ID NO: 826 | SEQ ID NO: 3192 | SEQ ID NO: 5558 |
| rs3131018 | SEQ ID NO: 827 | SEQ ID NO: 3193 | SEQ ID NO: 5559 |
| rs419957 | SEQ ID NO: 828 | SEQ ID NO: 3194 | SEQ ID NO: 5560 |
| rs1737075 | SEQ ID NO: 829 | SEQ ID NO: 3195 | SEQ ID NO: 5561 |
| rs3765607 | SEQ ID NO: 830 | SEQ ID NO: 3196 | SEQ ID NO: 5562 |
| rs1800683 | SEQ ID NO: 831 | SEQ ID NO: 3197 | SEQ ID NO: 5563 |
| rs3763315 | SEQ ID NO: 832 | SEQ ID NO: 3198 | SEQ ID NO: 5564 |
| rs2187824 | SEQ ID NO: 833 | SEQ ID NO: 3199 | SEQ ID NO: 5565 |
| rs6457041 | SEQ ID NO: 834 | SEQ ID NO: 3200 | SEQ ID NO: 5566 |
| rs2285797 | SEQ ID NO: 835 | SEQ ID NO: 3201 | SEQ ID NO: 5567 |
| rs2621336 | SEQ ID NO: 836 | SEQ ID NO: 3202 | SEQ ID NO: 5568 |
| rs4713614 | SEQ ID NO: 837 | SEQ ID NO: 3203 | SEQ ID NO: 5569 |
| rs4428528 | SEQ ID NO: 838 | SEQ ID NO: 3204 | SEQ ID NO: 5570 |
| rs2071365 | SEQ ID NO: 839 | SEQ ID NO: 3205 | SEQ ID NO: 5571 |
| rs2246638 | SEQ ID NO: 840 | SEQ ID NO: 3206 | SEQ ID NO: 5572 |
| rs1264697 | SEQ ID NO: 841 | SEQ ID NO: 3207 | SEQ ID NO: 5573 |
| rs2280773 | SEQ ID NO: 842 | SEQ ID NO: 3208 | SEQ ID NO: 5574 |
| rs4248169 | SEQ ID NO: 843 | SEQ ID NO: 3209 | SEQ ID NO: 5575 |
| rs1632941 | SEQ ID NO: 844 | SEQ ID NO: 3210 | SEQ ID NO: 5576 |
| rs1610653 | SEQ ID NO: 845 | SEQ ID NO: 3211 | SEQ ID NO: 5577 |
| rs6911894 | SEQ ID NO: 846 | SEQ ID NO: 3212 | SEQ ID NO: 5578 |
| rs3778614 | SEQ ID NO: 847 | SEQ ID NO: 3213 | SEQ ID NO: 5579 |
| rs2523619 | SEQ ID NO: 848 | SEQ ID NO: 3214 | SEQ ID NO: 5580 |
| rs3213483 | SEQ ID NO: 849 | SEQ ID NO: 3215 | SEQ ID NO: 5581 |
| rs2857713 | SEQ ID NO: 850 | SEQ ID NO: 3216 | SEQ ID NO: 5582 |
| rs2072632 | SEQ ID NO: 851 | SEQ ID NO: 3217 | SEQ ID NO: 5583 |
| rs2074469 | SEQ ID NO: 852 | SEQ ID NO: 3218 | SEQ ID NO: 5584 |
| rs2071876 | SEQ ID NO: 853 | SEQ ID NO: 3219 | SEQ ID NO: 5585 |
| rs3819686 | SEQ ID NO: 854 | SEQ ID NO: 3220 | SEQ ID NO: 5586 |
| rs1049414 | SEQ ID NO: 855 | SEQ ID NO: 3221 | SEQ ID NO: 5587 |
| rs1048412 | SEQ ID NO: 856 | SEQ ID NO: 3222 | SEQ ID NO: 5588 |
| rs2269420 | SEQ ID NO: 857 | SEQ ID NO: 3223 | SEQ ID NO: 5589 |
| rs7750641 | SEQ ID NO: 858 | SEQ ID NO: 3224 | SEQ ID NO: 5590 |
| rs2647027 | SEQ ID NO: 859 | SEQ ID NO: 3225 | SEQ ID NO: 5591 |
| rs3815095 | SEQ ID NO: 860 | SEQ ID NO: 3226 | SEQ ID NO: 5592 |
| rs3130999 | SEQ ID NO: 861 | SEQ ID NO: 3227 | SEQ ID NO: 5593 |
| rs3134940 | SEQ ID NO: 862 | SEQ ID NO: 3228 | SEQ ID NO: 5594 |
| rs743400 | SEQ ID NO: 863 | SEQ ID NO: 3229 | SEQ ID NO: 5595 |
| rs4711187 | SEQ ID NO: 864 | SEQ ID NO: 3230 | SEQ ID NO: 5596 |
| rs2395038 | SEQ ID NO: 865 | SEQ ID NO: 3231 | SEQ ID NO: 5597 |
| rs2239689 | SEQ ID NO: 866 | SEQ ID NO: 3232 | SEQ ID NO: 5598 |
| rs995185 | SEQ ID NO: 867 | SEQ ID NO: 3233 | SEQ ID NO: 5599 |
| rs3830041 | SEQ ID NO: 868 | SEQ ID NO: 3234 | SEQ ID NO: 5600 |
| rs2523945 | SEQ ID NO: 869 | SEQ ID NO: 3235 | SEQ ID NO: 5601 |
| rs3130099 | SEQ ID NO: 870 | SEQ ID NO: 3236 | SEQ ID NO: 5602 |
| rs3130374 | SEQ ID NO: 871 | SEQ ID NO: 3237 | SEQ ID NO: 5603 |
| rs2524272 | SEQ ID NO: 872 | SEQ ID NO: 3238 | SEQ ID NO: 5604 |
| rs3093558 | SEQ ID NO: 873 | SEQ ID NO: 3239 | SEQ ID NO: 5605 |
| rs7656 | SEQ ID NO: 874 | SEQ ID NO: 3240 | SEQ ID NO: 5606 |
| rs3093992 | SEQ ID NO: 875 | SEQ ID NO: 3241 | SEQ ID NO: 5607 |
| rs2428509 | SEQ ID NO: 876 | SEQ ID NO: 3242 | SEQ ID NO: 5608 |
| rs2071292 | SEQ ID NO: 877 | SEQ ID NO: 3243 | SEQ ID NO: 5609 |
| rs107822 | SEQ ID NO: 878 | SEQ ID NO: 3244 | SEQ ID NO: 5610 |
| rs3734860 | SEQ ID NO: 879 | SEQ ID NO: 3245 | SEQ ID NO: 5611 |
| rs4151667 | SEQ ID NO: 880 | SEQ ID NO: 3246 | SEQ ID NO: 5612 |
| rs887466 | SEQ ID NO: 881 | SEQ ID NO: 3247 | SEQ ID NO: 5613 |
| rs2857096 | SEQ ID NO: 882 | SEQ ID NO: 3248 | SEQ ID NO: 5614 |
| rs3130976 | SEQ ID NO: 883 | SEQ ID NO: 3249 | SEQ ID NO: 5615 |
| rs6910473 | SEQ ID NO: 884 | SEQ ID NO: 3250 | SEQ ID NO: 5616 |
| rs1633012 | SEQ ID NO: 885 | SEQ ID NO: 3251 | SEQ ID NO: 5617 |
| rs2523399 | SEQ ID NO: 886 | SEQ ID NO: 3252 | SEQ ID NO: 5618 |
| rs2071786 | SEQ ID NO: 887 | SEQ ID NO: 3253 | SEQ ID NO: 5619 |
| rs3823359 | SEQ ID NO: 888 | SEQ ID NO: 3254 | SEQ ID NO: 5620 |
| rs400488 | SEQ ID NO: 889 | SEQ ID NO: 3255 | SEQ ID NO: 5621 |
| rs2239697 | SEQ ID NO: 890 | SEQ ID NO: 3256 | SEQ ID NO: 5622 |
| rs4959041 | SEQ ID NO: 891 | SEQ ID NO: 3257 | SEQ ID NO: 5623 |
| rs1042434 | SEQ ID NO: 892 | SEQ ID NO: 3258 | SEQ ID NO: 5624 |
| rs3819275 | SEQ ID NO: 893 | SEQ ID NO: 3259 | SEQ ID NO: 5625 |
| rs381218 | SEQ ID NO: 894 | SEQ ID NO: 3260 | SEQ ID NO: 5626 |
| rs29230 | SEQ ID NO: 895 | SEQ ID NO: 3261 | SEQ ID NO: 5627 |
| rs2301226 | SEQ ID NO: 896 | SEQ ID NO: 3262 | SEQ ID NO: 5628 |
| rs742870 | SEQ ID NO: 897 | SEQ ID NO: 3263 | SEQ ID NO: 5629 |
| rs6905862 | SEQ ID NO: 898 | SEQ ID NO: 3264 | SEQ ID NO: 5630 |
| rs3129938 | SEQ ID NO: 899 | SEQ ID NO: 3265 | SEQ ID NO: 5631 |
| rs1736939 | SEQ ID NO: 900 | SEQ ID NO: 3266 | SEQ ID NO: 5632 |
| rs4548006 | SEQ ID NO: 901 | SEQ ID NO: 3267 | SEQ ID NO: 5633 |
| rs2857767 | SEQ ID NO: 902 | SEQ ID NO: 3268 | SEQ ID NO: 5634 |
| rs241442 | SEQ ID NO: 903 | SEQ ID NO: 3269 | SEQ ID NO: 5635 |
| rs3093671 | SEQ ID NO: 904 | SEQ ID NO: 3270 | SEQ ID NO: 5636 |
| rs2857433 | SEQ ID NO: 905 | SEQ ID NO: 3271 | SEQ ID NO: 5637 |
| rs1800453 | SEQ ID NO: 906 | SEQ ID NO: 3272 | SEQ ID NO: 5638 |
| rs1049628 | SEQ ID NO: 907 | SEQ ID NO: 3273 | SEQ ID NO: 5639 |
| rs2769 | SEQ ID NO: 908 | SEQ ID NO: 3274 | SEQ ID NO: 5640 |
| rs3763295 | SEQ ID NO: 909 | SEQ ID NO: 3275 | SEQ ID NO: 5641 |
| rs3763338 | SEQ ID NO: 910 | SEQ ID NO: 3276 | SEQ ID NO: 5642 |
| rs6910733 | SEQ ID NO: 911 | SEQ ID NO: 3277 | SEQ ID NO: 5643 |
| rs3830037 | SEQ ID NO: 912 | SEQ ID NO: 3278 | SEQ ID NO: 5644 |
| rs2858330 | SEQ ID NO: 913 | SEQ ID NO: 3279 | SEQ ID NO: 5645 |
| rs1076711 | SEQ ID NO: 914 | SEQ ID NO: 3280 | SEQ ID NO: 5646 |
| rs2272874 | SEQ ID NO: 915 | SEQ ID NO: 3281 | SEQ ID NO: 5647 |
| rs762324 | SEQ ID NO: 916 | SEQ ID NO: 3282 | SEQ ID NO: 5648 |
| rs2061952 | SEQ ID NO: 917 | SEQ ID NO: 3283 | SEQ ID NO: 5649 |
| rs4647195 | SEQ ID NO: 918 | SEQ ID NO: 3284 | SEQ ID NO: 5650 |
| rs2523400 | SEQ ID NO: 919 | SEQ ID NO: 3285 | SEQ ID NO: 5651 |
| rs1041981 | SEQ ID NO: 920 | SEQ ID NO: 3286 | SEQ ID NO: 5652 |
| rs1367729 | SEQ ID NO: 921 | SEQ ID NO: 3287 | SEQ ID NO: 5653 |
| rs2523943 | SEQ ID NO: 922 | SEQ ID NO: 3288 | SEQ ID NO: 5654 |
| rs1233421 | SEQ ID NO: 923 | SEQ ID NO: 3289 | SEQ ID NO: 5655 |
| rs4988888 | SEQ ID NO: 924 | SEQ ID NO: 3290 | SEQ ID NO: 5656 |
| rs4713260 | SEQ ID NO: 925 | SEQ ID NO: 3291 | SEQ ID NO: 5657 |
| rs3095227 | SEQ ID NO: 926 | SEQ ID NO: 3292 | SEQ ID NO: 5658 |
| rs2596538 | SEQ ID NO: 927 | SEQ ID NO: 3293 | SEQ ID NO: 5659 |
| rs1480382 | SEQ ID NO: 928 | SEQ ID NO: 3294 | SEQ ID NO: 5660 |
| rs2229699 | SEQ ID NO: 929 | SEQ ID NO: 3295 | SEQ ID NO: 5661 |
| rs2276447 | SEQ ID NO: 930 | SEQ ID NO: 3296 | SEQ ID NO: 5662 |
| rs2074511 | SEQ ID NO: 931 | SEQ ID NO: 3297 | SEQ ID NO: 5663 |
| rs2285795 | SEQ ID NO: 932 | SEQ ID NO: 3298 | SEQ ID NO: 5664 |
| rs2523959 | SEQ ID NO: 933 | SEQ ID NO: 3299 | SEQ ID NO: 5665 |
| rs5020983 | SEQ ID NO: 934 | SEQ ID NO: 3300 | SEQ ID NO: 5666 |
| rs2071353 | SEQ ID NO: 935 | SEQ ID NO: 3301 | SEQ ID NO: 5667 |
| rs1610646 | SEQ ID NO: 936 | SEQ ID NO: 3302 | SEQ ID NO: 5668 |
| rs3117035 | SEQ ID NO: 937 | SEQ ID NO: 3303 | SEQ ID NO: 5669 |
| rs2071470 | SEQ ID NO: 938 | SEQ ID NO: 3304 | SEQ ID NO: 5670 |
| rs376892 | SEQ ID NO: 939 | SEQ ID NO: 3305 | SEQ ID NO: 5671 |
| rs1631950 | SEQ ID NO: 940 | SEQ ID NO: 3306 | SEQ ID NO: 5672 |
| rs206781 | SEQ ID NO: 941 | SEQ ID NO: 3307 | SEQ ID NO: 5673 |
| rs2071592 | SEQ ID NO: 942 | SEQ ID NO: 3308 | SEQ ID NO: 5674 |
| rs4713274 | SEQ ID NO: 943 | SEQ ID NO: 3309 | SEQ ID NO: 5675 |
| rs4959119 | SEQ ID NO: 944 | SEQ ID NO: 3310 | SEQ ID NO: 5676 |
| rs3129744 | SEQ ID NO: 945 | SEQ ID NO: 3311 | SEQ ID NO: 5677 |
| rs1737086 | SEQ ID NO: 946 | SEQ ID NO: 3312 | SEQ ID NO: 5678 |
| rs2523960 | SEQ ID NO: 947 | SEQ ID NO: 3313 | SEQ ID NO: 5679 |
| rs5020984 | SEQ ID NO: 948 | SEQ ID NO: 3314 | SEQ ID NO: 5680 |
| rs3093542 | SEQ ID NO: 949 | SEQ ID NO: 3315 | SEQ ID NO: 5681 |
| rs2127680 | SEQ ID NO: 950 | SEQ ID NO: 3316 | SEQ ID NO: 5682 |
| rs2844508 | SEQ ID NO: 951 | SEQ ID NO: 3317 | SEQ ID NO: 5683 |
| rs3093554 | SEQ ID NO: 952 | SEQ ID NO: 3318 | SEQ ID NO: 5684 |
| rs1268928 | SEQ ID NO: 953 | SEQ ID NO: 3319 | SEQ ID NO: 5685 |
| rs2294881 | SEQ ID NO: 954 | SEQ ID NO: 3320 | SEQ ID NO: 5686 |
| rs7773149 | SEQ ID NO: 955 | SEQ ID NO: 3321 | SEQ ID NO: 5687 |
| rs2524197 | SEQ ID NO: 956 | SEQ ID NO: 3322 | SEQ ID NO: 5688 |
| rs1419635 | SEQ ID NO: 957 | SEQ ID NO: 3323 | SEQ ID NO: 5689 |
| rs7755774 | SEQ ID NO: 958 | SEQ ID NO: 3324 | SEQ ID NO: 5690 |
| rs3131001 | SEQ ID NO: 959 | SEQ ID NO: 3325 | SEQ ID NO: 5691 |
| rs1610676 | SEQ ID NO: 960 | SEQ ID NO: 3326 | SEQ ID NO: 5692 |
| rs6901686 | SEQ ID NO: 961 | SEQ ID NO: 3327 | SEQ ID NO: 5693 |
| rs3094200 | SEQ ID NO: 962 | SEQ ID NO: 3328 | SEQ ID NO: 5694 |
| rs2523705 | SEQ ID NO: 963 | SEQ ID NO: 3329 | SEQ ID NO: 5695 |
| rs885948 | SEQ ID NO: 964 | SEQ ID NO: 3330 | SEQ ID NO: 5696 |
| rs2009658 | SEQ ID NO: 965 | SEQ ID NO: 3331 | SEQ ID NO: 5697 |
| rs2517754 | SEQ ID NO: 966 | SEQ ID NO: 3332 | SEQ ID NO: 5698 |
| rs2596499 | SEQ ID NO: 967 | SEQ ID NO: 3333 | SEQ ID NO: 5699 |
| rs929156 | SEQ ID NO: 968 | SEQ ID NO: 3334 | SEQ ID NO: 5700 |
| rs2076312 | SEQ ID NO: 969 | SEQ ID NO: 3335 | SEQ ID NO: 5701 |
| rs3093666 | SEQ ID NO: 970 | SEQ ID NO: 3336 | SEQ ID NO: 5702 |
| rs3132520 | SEQ ID NO: 971 | SEQ ID NO: 3337 | SEQ ID NO: 5703 |
| rs7773175 | SEQ ID NO: 972 | SEQ ID NO: 3338 | SEQ ID NO: 5704 |
| rs3116956 | SEQ ID NO: 973 | SEQ ID NO: 3339 | SEQ ID NO: 5705 |
| rs3823417 | SEQ ID NO: 974 | SEQ ID NO: 3340 | SEQ ID NO: 5706 |
| rs1265092 | SEQ ID NO: 975 | SEQ ID NO: 3341 | SEQ ID NO: 5707 |
| rs204889 | SEQ ID NO: 976 | SEQ ID NO: 3342 | SEQ ID NO: 5708 |
| rs910320 | SEQ ID NO: 977 | SEQ ID NO: 3343 | SEQ ID NO: 5709 |
| rs2239886 | SEQ ID NO: 978 | SEQ ID NO: 3344 | SEQ ID NO: 5710 |
| rs2158279 | SEQ ID NO: 979 | SEQ ID NO: 3345 | SEQ ID NO: 5711 |
| rs463260 | SEQ ID NO: 980 | SEQ ID NO: 3346 | SEQ ID NO: 5712 |
| rs2523713 | SEQ ID NO: 981 | SEQ ID NO: 3347 | SEQ ID NO: 5713 |
| rs2072915 | SEQ ID NO: 982 | SEQ ID NO: 3348 | SEQ ID NO: 5714 |
| rs2187578 | SEQ ID NO: 983 | SEQ ID NO: 3349 | SEQ ID NO: 5715 |
| rs2246626 | SEQ ID NO: 984 | SEQ ID NO: 3350 | SEQ ID NO: 5716 |
| rs2517672 | SEQ ID NO: 985 | SEQ ID NO: 3351 | SEQ ID NO: 5717 |
| rs2076489 | SEQ ID NO: 986 | SEQ ID NO: 3352 | SEQ ID NO: 5718 |
| rs1264322 | SEQ ID NO: 987 | SEQ ID NO: 3353 | SEQ ID NO: 5719 |
| rs2523970 | SEQ ID NO: 988 | SEQ ID NO: 3354 | SEQ ID NO: 5720 |
| rs2073722 | SEQ ID NO: 989 | SEQ ID NO: 3355 | SEQ ID NO: 5721 |
| rs6915224 | SEQ ID NO: 990 | SEQ ID NO: 3356 | SEQ ID NO: 5722 |
| rs209130 | SEQ ID NO: 991 | SEQ ID NO: 3357 | SEQ ID NO: 5723 |
| rs5017092 | SEQ ID NO: 992 | SEQ ID NO: 3358 | SEQ ID NO: 5724 |
| rs3130552 | SEQ ID NO: 993 | SEQ ID NO: 3359 | SEQ ID NO: 5725 |
| rs2247720 | SEQ ID NO: 994 | SEQ ID NO: 3360 | SEQ ID NO: 5726 |
| rs3807036 | SEQ ID NO: 995 | SEQ ID NO: 3361 | SEQ ID NO: 5727 |
| rs1049622 | SEQ ID NO: 996 | SEQ ID NO: 3362 | SEQ ID NO: 5728 |
| rs2179915 | SEQ ID NO: 997 | SEQ ID NO: 3363 | SEQ ID NO: 5729 |
| rs6930217 | SEQ ID NO: 998 | SEQ ID NO: 3364 | SEQ ID NO: 5730 |
| rs3093553 | SEQ ID NO: 999 | SEQ ID NO: 3365 | SEQ ID NO: 5731 |
| rs6457597 | SEQ ID NO: 1000 | SEQ ID NO: 3366 | SEQ ID NO: 5732 |
| rs241437 | SEQ ID NO: 1001 | SEQ ID NO: 3367 | SEQ ID NO: 5733 |
| rs5026740 | SEQ ID NO: 1002 | SEQ ID NO: 3368 | SEQ ID NO: 5734 |
| rs15604 | SEQ ID NO: 1003 | SEQ ID NO: 3369 | SEQ ID NO: 5735 |
| rs2071800 | SEQ ID NO: 1004 | SEQ ID NO: 3370 | SEQ ID NO: 5736 |
| rs2844522 | SEQ ID NO: 1005 | SEQ ID NO: 3371 | SEQ ID NO: 5737 |
| rs2516409 | SEQ ID NO: 1006 | SEQ ID NO: 3372 | SEQ ID NO: 5738 |
| rs7770592 | SEQ ID NO: 1007 | SEQ ID NO: 3373 | SEQ ID NO: 5739 |
| rs444013 | SEQ ID NO: 1008 | SEQ ID NO: 3374 | SEQ ID NO: 5740 |
| rs2844846 | SEQ ID NO: 1009 | SEQ ID NO: 3375 | SEQ ID NO: 5741 |
| rs3757346 | SEQ ID NO: 1010 | SEQ ID NO: 3376 | SEQ ID NO: 5742 |
| rs3134929 | SEQ ID NO: 1011 | SEQ ID NO: 3377 | SEQ ID NO: 5743 |
| rs401775 | SEQ ID NO: 1012 | SEQ ID NO: 3378 | SEQ ID NO: 5744 |
| rs6924267 | SEQ ID NO: 1013 | SEQ ID NO: 3379 | SEQ ID NO: 5745 |
| rs2517673 | SEQ ID NO: 1014 | SEQ ID NO: 3380 | SEQ ID NO: 5746 |
| rs1736980 | SEQ ID NO: 1015 | SEQ ID NO: 3381 | SEQ ID NO: 5747 |
| rs1611203 | SEQ ID NO: 1016 | SEQ ID NO: 3382 | SEQ ID NO: 5748 |
| rs7768484 | SEQ ID NO: 1017 | SEQ ID NO: 3383 | SEQ ID NO: 5749 |
| rs7741100 | SEQ ID NO: 1018 | SEQ ID NO: 3384 | SEQ ID NO: 5750 |
| rs2294884 | SEQ ID NO: 1019 | SEQ ID NO: 3385 | SEQ ID NO: 5751 |
| rs2308935 | SEQ ID NO: 1020 | SEQ ID NO: 3386 | SEQ ID NO: 5752 |
| rs2282850 | SEQ ID NO: 1021 | SEQ ID NO: 3387 | SEQ ID NO: 5753 |
| rs2073154 | SEQ ID NO: 1022 | SEQ ID NO: 3388 | SEQ ID NO: 5754 |
| rs1265095 | SEQ ID NO: 1023 | SEQ ID NO: 3389 | SEQ ID NO: 5755 |
| rs3095317 | SEQ ID NO: 1024 | SEQ ID NO: 3390 | SEQ ID NO: 5756 |
| rs3778630 | SEQ ID NO: 1025 | SEQ ID NO: 3391 | SEQ ID NO: 5757 |
| rs3869090 | SEQ ID NO: 1026 | SEQ ID NO: 3392 | SEQ ID NO: 5758 |
| rs415929 | SEQ ID NO: 1027 | SEQ ID NO: 3393 | SEQ ID NO: 5759 |
| rs2747431 | SEQ ID NO: 1028 | SEQ ID NO: 3394 | SEQ ID NO: 5760 |
| rs2428507 | SEQ ID NO: 1029 | SEQ ID NO: 3395 | SEQ ID NO: 5761 |
| rs2295666 | SEQ ID NO: 1030 | SEQ ID NO: 3396 | SEQ ID NO: 5762 |
| rs1233427 | SEQ ID NO: 1031 | SEQ ID NO: 3397 | SEQ ID NO: 5763 |
| rs7774644 | SEQ ID NO: 1032 | SEQ ID NO: 3398 | SEQ ID NO: 5764 |
| rs3095309 | SEQ ID NO: 1033 | SEQ ID NO: 3399 | SEQ ID NO: 5765 |
| rs5872 | SEQ ID NO: 1034 | SEQ ID NO: 3400 | SEQ ID NO: 5766 |
| rs1033500 | SEQ ID NO: 1035 | SEQ ID NO: 3401 | SEQ ID NO: 5767 |
| rs3763306 | SEQ ID NO: 1036 | SEQ ID NO: 3402 | SEQ ID NO: 5768 |
| rs635688 | SEQ ID NO: 1037 | SEQ ID NO: 3403 | SEQ ID NO: 5769 |
| rs4151669 | SEQ ID NO: 1038 | SEQ ID NO: 3404 | SEQ ID NO: 5770 |
| rs2076527 | SEQ ID NO: 1039 | SEQ ID NO: 3405 | SEQ ID NO: 5771 |
| rs3178162 | SEQ ID NO: 1040 | SEQ ID NO: 3406 | SEQ ID NO: 5772 |
| rs241449 | SEQ ID NO: 1041 | SEQ ID NO: 3407 | SEQ ID NO: 5773 |
| rs4435981 | SEQ ID NO: 1042 | SEQ ID NO: 3408 | SEQ ID NO: 5774 |
| rs6456897 | SEQ ID NO: 1043 | SEQ ID NO: 3409 | SEQ ID NO: 5775 |
| rs3828923 | SEQ ID NO: 1044 | SEQ ID NO: 3410 | SEQ ID NO: 5776 |
| rs2179920 | SEQ ID NO: 1045 | SEQ ID NO: 3411 | SEQ ID NO: 5777 |
| rs3218806 | SEQ ID NO: 1046 | SEQ ID NO: 3412 | SEQ ID NO: 5778 |
| rs2076175 | SEQ ID NO: 1047 | SEQ ID NO: 3413 | SEQ ID NO: 5779 |
| rs3871246 | SEQ ID NO: 1048 | SEQ ID NO: 3414 | SEQ ID NO: 5780 |
| rs2281388 | SEQ ID NO: 1049 | SEQ ID NO: 3415 | SEQ ID NO: 5781 |
| rs3763314 | SEQ ID NO: 1050 | SEQ ID NO: 3416 | SEQ ID NO: 5782 |
| rs6913173 | SEQ ID NO: 1051 | SEQ ID NO: 3417 | SEQ ID NO: 5783 |
| rs3873408 | SEQ ID NO: 1052 | SEQ ID NO: 3418 | SEQ ID NO: 5784 |
| rs3997995 | SEQ ID NO: 1053 | SEQ ID NO: 3419 | SEQ ID NO: 5785 |
| rs2523924 | SEQ ID NO: 1054 | SEQ ID NO: 3420 | SEQ ID NO: 5786 |
| rs2239517 | SEQ ID NO: 1055 | SEQ ID NO: 3421 | SEQ ID NO: 5787 |
| rs3094225 | SEQ ID NO: 1056 | SEQ ID NO: 3422 | SEQ ID NO: 5788 |
| rs3869117 | SEQ ID NO: 1057 | SEQ ID NO: 3423 | SEQ ID NO: 5789 |
| rs3734837 | SEQ ID NO: 1058 | SEQ ID NO: 3424 | SEQ ID NO: 5790 |
| rs2524180 | SEQ ID NO: 1059 | SEQ ID NO: 3425 | SEQ ID NO: 5791 |
| rs2844804 | SEQ ID NO: 1060 | SEQ ID NO: 3426 | SEQ ID NO: 5792 |
| rs2206618 | SEQ ID NO: 1061 | SEQ ID NO: 3427 | SEQ ID NO: 5793 |
| rs406424 | SEQ ID NO: 1062 | SEQ ID NO: 3428 | SEQ ID NO: 5794 |
| rs3830038 | SEQ ID NO: 1063 | SEQ ID NO: 3429 | SEQ ID NO: 5795 |
| rs1048709 | SEQ ID NO: 1064 | SEQ ID NO: 3430 | SEQ ID NO: 5796 |
| rs3093661 | SEQ ID NO: 1065 | SEQ ID NO: 3431 | SEQ ID NO: 5797 |
| rs2252856 | SEQ ID NO: 1066 | SEQ ID NO: 3432 | SEQ ID NO: 5798 |
| rs2857177 | SEQ ID NO: 1067 | SEQ ID NO: 3433 | SEQ ID NO: 5799 |
| rs9968 | SEQ ID NO: 1068 | SEQ ID NO: 3434 | SEQ ID NO: 5800 |
| rs365052 | SEQ ID NO: 1069 | SEQ ID NO: 3435 | SEQ ID NO: 5801 |
| rs1800624 | SEQ ID NO: 1070 | SEQ ID NO: 3436 | SEQ ID NO: 5802 |
| rs2856715 | SEQ ID NO: 1071 | SEQ ID NO: 3437 | SEQ ID NO: 5803 |
| rs3130444 | SEQ ID NO: 1072 | SEQ ID NO: 3438 | SEQ ID NO: 5804 |
| rs2071551 | SEQ ID NO: 1073 | SEQ ID NO: 3439 | SEQ ID NO: 5805 |
| rs2301221 | SEQ ID NO: 1074 | SEQ ID NO: 3440 | SEQ ID NO: 5806 |
| rs6927322 | SEQ ID NO: 1075 | SEQ ID NO: 3441 | SEQ ID NO: 5807 |
| rs7768179 | SEQ ID NO: 1076 | SEQ ID NO: 3442 | SEQ ID NO: 5808 |
| rs6913646 | SEQ ID NO: 1077 | SEQ ID NO: 3443 | SEQ ID NO: 5809 |
| rs2256820 | SEQ ID NO: 1078 | SEQ ID NO: 3444 | SEQ ID NO: 5810 |
| rs4713410 | SEQ ID NO: 1079 | SEQ ID NO: 3445 | SEQ ID NO: 5811 |
| rs872956 | SEQ ID NO: 1080 | SEQ ID NO: 3446 | SEQ ID NO: 5812 |
| rs4959077 | SEQ ID NO: 1081 | SEQ ID NO: 3447 | SEQ ID NO: 5813 |
| rs2071282 | SEQ ID NO: 1082 | SEQ ID NO: 3448 | SEQ ID NO: 5814 |
| rs1264328 | SEQ ID NO: 1083 | SEQ ID NO: 3449 | SEQ ID NO: 5815 |
| rs3918149 | SEQ ID NO: 1084 | SEQ ID NO: 3450 | SEQ ID NO: 5816 |
| rs2157051 | SEQ ID NO: 1085 | SEQ ID NO: 3451 | SEQ ID NO: 5817 |
| rs7750514 | SEQ ID NO: 1086 | SEQ ID NO: 3452 | SEQ ID NO: 5818 |
| rs3128964 | SEQ ID NO: 1087 | SEQ ID NO: 3453 | SEQ ID NO: 5819 |
| rs6912877 | SEQ ID NO: 1088 | SEQ ID NO: 3454 | SEQ ID NO: 5820 |
| rs1541268 | SEQ ID NO: 1089 | SEQ ID NO: 3455 | SEQ ID NO: 5821 |
| rs6906175 | SEQ ID NO: 1090 | SEQ ID NO: 3456 | SEQ ID NO: 5822 |
| rs2074506 | SEQ ID NO: 1091 | SEQ ID NO: 3457 | SEQ ID NO: 5823 |
| rs2239523 | SEQ ID NO: 1092 | SEQ ID NO: 3458 | SEQ ID NO: 5824 |
| rs2242665 | SEQ ID NO: 1093 | SEQ ID NO: 3459 | SEQ ID NO: 5825 |
| rs3131300 | SEQ ID NO: 1094 | SEQ ID NO: 3460 | SEQ ID NO: 5826 |
| rs465223 | SEQ ID NO: 1095 | SEQ ID NO: 3461 | SEQ ID NO: 5827 |
| rs3819299 | SEQ ID NO: 1096 | SEQ ID NO: 3462 | SEQ ID NO: 5828 |
| rs2844524 | SEQ ID NO: 1097 | SEQ ID NO: 3463 | SEQ ID NO: 5829 |
| rs6915440 | SEQ ID NO: 1098 | SEQ ID NO: 3464 | SEQ ID NO: 5830 |
| rs1614309 | SEQ ID NO: 1099 | SEQ ID NO: 3465 | SEQ ID NO: 5831 |
| rs2076183 | SEQ ID NO: 1100 | SEQ ID NO: 3466 | SEQ ID NO: 5832 |
| rs3763311 | SEQ ID NO: 1101 | SEQ ID NO: 3467 | SEQ ID NO: 5833 |
| rs3097650 | SEQ ID NO: 1102 | SEQ ID NO: 3468 | SEQ ID NO: 5834 |
| rs2743945 | SEQ ID NO: 1103 | SEQ ID NO: 3469 | SEQ ID NO: 5835 |
| rs1737087 | SEQ ID NO: 1104 | SEQ ID NO: 3470 | SEQ ID NO: 5836 |
| rs1611165 | SEQ ID NO: 1105 | SEQ ID NO: 3471 | SEQ ID NO: 5837 |
| rs3828913 | SEQ ID NO: 1106 | SEQ ID NO: 3472 | SEQ ID NO: 5838 |
| rs3763312 | SEQ ID NO: 1107 | SEQ ID NO: 3473 | SEQ ID NO: 5839 |
| rs2269711 | SEQ ID NO: 1108 | SEQ ID NO: 3474 | SEQ ID NO: 5840 |
| rs2243873 | SEQ ID NO: 1109 | SEQ ID NO: 3475 | SEQ ID NO: 5841 |
| rs2072108 | SEQ ID NO: 1110 | SEQ ID NO: 3476 | SEQ ID NO: 5842 |
| rs7770882 | SEQ ID NO: 1111 | SEQ ID NO: 3477 | SEQ ID NO: 5843 |
| rs1736935 | SEQ ID NO: 1112 | SEQ ID NO: 3478 | SEQ ID NO: 5844 |
| rs3823420 | SEQ ID NO: 1113 | SEQ ID NO: 3479 | SEQ ID NO: 5845 |
| rs2071571 | SEQ ID NO: 1114 | SEQ ID NO: 3480 | SEQ ID NO: 5846 |
| rs3093726 | SEQ ID NO: 1115 | SEQ ID NO: 3481 | SEQ ID NO: 5847 |
| rs973233 | SEQ ID NO: 1116 | SEQ ID NO: 3482 | SEQ ID NO: 5848 |
| rs1150772 | SEQ ID NO: 1117 | SEQ ID NO: 3483 | SEQ ID NO: 5849 |
| rs1264301 | SEQ ID NO: 1118 | SEQ ID NO: 3484 | SEQ ID NO: 5850 |
| rs367398 | SEQ ID NO: 1119 | SEQ ID NO: 3485 | SEQ ID NO: 5851 |
| rs241451 | SEQ ID NO: 1120 | SEQ ID NO: 3486 | SEQ ID NO: 5852 |
| rs2076528 | SEQ ID NO: 1121 | SEQ ID NO: 3487 | SEQ ID NO: 5853 |
| rs3115615 | SEQ ID NO: 1122 | SEQ ID NO: 3488 | SEQ ID NO: 5854 |
| rs2228088 | SEQ ID NO: 1123 | SEQ ID NO: 3489 | SEQ ID NO: 5855 |
| rs2269611 | SEQ ID NO: 1124 | SEQ ID NO: 3490 | SEQ ID NO: 5856 |
| rs408036 | SEQ ID NO: 1125 | SEQ ID NO: 3491 | SEQ ID NO: 5857 |
| rs3130998 | SEQ ID NO: 1126 | SEQ ID NO: 3492 | SEQ ID NO: 5858 |
| rs2022537 | SEQ ID NO: 1127 | SEQ ID NO: 3493 | SEQ ID NO: 5859 |
| rs2239520 | SEQ ID NO: 1128 | SEQ ID NO: 3494 | SEQ ID NO: 5860 |
| rs4993139 | SEQ ID NO: 1129 | SEQ ID NO: 3495 | SEQ ID NO: 5861 |
| rs3094215 | SEQ ID NO: 1130 | SEQ ID NO: 3496 | SEQ ID NO: 5862 |
| rs1063379 | SEQ ID NO: 1131 | SEQ ID NO: 3497 | SEQ ID NO: 5863 |
| rs259942 | SEQ ID NO: 1132 | SEQ ID NO: 3498 | SEQ ID NO: 5864 |
| rs3734861 | SEQ ID NO: 1133 | SEQ ID NO: 3499 | SEQ ID NO: 5865 |
| rs2499 | SEQ ID NO: 1134 | SEQ ID NO: 3500 | SEQ ID NO: 5866 |
| rs4713250 | SEQ ID NO: 1135 | SEQ ID NO: 3501 | SEQ ID NO: 5867 |
| rs2269426 | SEQ ID NO: 1136 | SEQ ID NO: 3502 | SEQ ID NO: 5868 |
| rs887467 | SEQ ID NO: 1137 | SEQ ID NO: 3503 | SEQ ID NO: 5869 |
| rs2269712 | SEQ ID NO: 1138 | SEQ ID NO: 3504 | SEQ ID NO: 5870 |
| rs2302396 | SEQ ID NO: 1139 | SEQ ID NO: 3505 | SEQ ID NO: 5871 |
| rs2008560 | SEQ ID NO: 1140 | SEQ ID NO: 3506 | SEQ ID NO: 5872 |
| rs1480383 | SEQ ID NO: 1141 | SEQ ID NO: 3507 | SEQ ID NO: 5873 |
| rs3129997 | SEQ ID NO: 1142 | SEQ ID NO: 3508 | SEQ ID NO: 5874 |
| rs2517588 | SEQ ID NO: 1143 | SEQ ID NO: 3509 | SEQ ID NO: 5875 |
| rs465474 | SEQ ID NO: 1144 | SEQ ID NO: 3510 | SEQ ID NO: 5876 |
| rs3218812 | SEQ ID NO: 1145 | SEQ ID NO: 3511 | SEQ ID NO: 5877 |
| rs2523791 | SEQ ID NO: 1146 | SEQ ID NO: 3512 | SEQ ID NO: 5878 |
| rs3828912 | SEQ ID NO: 1147 | SEQ ID NO: 3513 | SEQ ID NO: 5879 |
| rs2517444 | SEQ ID NO: 1148 | SEQ ID NO: 3514 | SEQ ID NO: 5880 |
| rs2257347 | SEQ ID NO: 1149 | SEQ ID NO: 3515 | SEQ ID NO: 5881 |
| rs364950 | SEQ ID NO: 1150 | SEQ ID NO: 3516 | SEQ ID NO: 5882 |
| rs2006164 | SEQ ID NO: 1151 | SEQ ID NO: 3517 | SEQ ID NO: 5883 |
| rs2857172 | SEQ ID NO: 1152 | SEQ ID NO: 3518 | SEQ ID NO: 5884 |
| rs3873243 | SEQ ID NO: 1153 | SEQ ID NO: 3519 | SEQ ID NO: 5885 |
| rs3763327 | SEQ ID NO: 1154 | SEQ ID NO: 3520 | SEQ ID NO: 5886 |
| rs1061801 | SEQ ID NO: 1155 | SEQ ID NO: 3521 | SEQ ID NO: 5887 |
| rs4713519 | SEQ ID NO: 1156 | SEQ ID NO: 3522 | SEQ ID NO: 5888 |
| rs909722 | SEQ ID NO: 1157 | SEQ ID NO: 3523 | SEQ ID NO: 5889 |
| rs2213569 | SEQ ID NO: 1158 | SEQ ID NO: 3524 | SEQ ID NO: 5890 |
| rs644827 | SEQ ID NO: 1159 | SEQ ID NO: 3525 | SEQ ID NO: 5891 |
| rs3763341 | SEQ ID NO: 1160 | SEQ ID NO: 3526 | SEQ ID NO: 5892 |
| rs2254287 | SEQ ID NO: 1161 | SEQ ID NO: 3527 | SEQ ID NO: 5893 |
| rs769178 | SEQ ID NO: 1162 | SEQ ID NO: 3528 | SEQ ID NO: 5894 |
| rs2270190 | SEQ ID NO: 1163 | SEQ ID NO: 3529 | SEQ ID NO: 5895 |
| rs986521 | SEQ ID NO: 1164 | SEQ ID NO: 3530 | SEQ ID NO: 5896 |
| rs206775 | SEQ ID NO: 1165 | SEQ ID NO: 3531 | SEQ ID NO: 5897 |
| rs241447 | SEQ ID NO: 1166 | SEQ ID NO: 3532 | SEQ ID NO: 5898 |
| rs2157336 | SEQ ID NO: 1167 | SEQ ID NO: 3533 | SEQ ID NO: 5899 |
| rs1044507 | SEQ ID NO: 1168 | SEQ ID NO: 3534 | SEQ ID NO: 5900 |
| rs3094204 | SEQ ID NO: 1169 | SEQ ID NO: 3535 | SEQ ID NO: 5901 |
| rs1611613 | SEQ ID NO: 1170 | SEQ ID NO: 3536 | SEQ ID NO: 5902 |
| rs1736927 | SEQ ID NO: 1171 | SEQ ID NO: 3537 | SEQ ID NO: 5903 |
| rs2855438 | SEQ ID NO: 1172 | SEQ ID NO: 3538 | SEQ ID NO: 5904 |
| rs3819284 | SEQ ID NO: 1173 | SEQ ID NO: 3539 | SEQ ID NO: 5905 |
| rs6913471 | SEQ ID NO: 1174 | SEQ ID NO: 3540 | SEQ ID NO: 5906 |
| rs969892 | SEQ ID NO: 1175 | SEQ ID NO: 3541 | SEQ ID NO: 5907 |
| rs2516507 | SEQ ID NO: 1176 | SEQ ID NO: 3542 | SEQ ID NO: 5908 |
| rs2071552 | SEQ ID NO: 1177 | SEQ ID NO: 3543 | SEQ ID NO: 5909 |
| rs375256 | SEQ ID NO: 1178 | SEQ ID NO: 3544 | SEQ ID NO: 5910 |
| rs2074465 | SEQ ID NO: 1179 | SEQ ID NO: 3545 | SEQ ID NO: 5911 |
| rs3130712 | SEQ ID NO: 1180 | SEQ ID NO: 3546 | SEQ ID NO: 5912 |
| rs2286654 | SEQ ID NO: 1181 | SEQ ID NO: 3547 | SEQ ID NO: 5913 |
| rs1265089 | SEQ ID NO: 1182 | SEQ ID NO: 3548 | SEQ ID NO: 5914 |
| rs915652 | SEQ ID NO: 1183 | SEQ ID NO: 3549 | SEQ ID NO: 5915 |
| rs362513 | SEQ ID NO: 1184 | SEQ ID NO: 3550 | SEQ ID NO: 5916 |
| rs3736710 | SEQ ID NO: 1185 | SEQ ID NO: 3551 | SEQ ID NO: 5917 |
| rs3130662 | SEQ ID NO: 1186 | SEQ ID NO: 3552 | SEQ ID NO: 5918 |
| rs2524056 | SEQ ID NO: 1187 | SEQ ID NO: 3553 | SEQ ID NO: 5919 |
| rs2395039 | SEQ ID NO: 1188 | SEQ ID NO: 3554 | SEQ ID NO: 5920 |
| rs683208 | SEQ ID NO: 1189 | SEQ ID NO: 3555 | SEQ ID NO: 5921 |
| rs1264320 | SEQ ID NO: 1190 | SEQ ID NO: 3556 | SEQ ID NO: 5922 |
| rs2074492 | SEQ ID NO: 1191 | SEQ ID NO: 3557 | SEQ ID NO: 5923 |
| rs4524656 | SEQ ID NO: 1192 | SEQ ID NO: 3558 | SEQ ID NO: 5924 |
| rs3130934 | SEQ ID NO: 1193 | SEQ ID NO: 3559 | SEQ ID NO: 5925 |
| rs1264457 | SEQ ID NO: 1194 | SEQ ID NO: 3560 | SEQ ID NO: 5926 |
| rs2242667 | SEQ ID NO: 1195 | SEQ ID NO: 3561 | SEQ ID NO: 5927 |
| rs7739536 | SEQ ID NO: 1196 | SEQ ID NO: 3562 | SEQ ID NO: 5928 |
| rs409715 | SEQ ID NO: 1197 | SEQ ID NO: 3563 | SEQ ID NO: 5929 |
| rs3828914 | SEQ ID NO: 1198 | SEQ ID NO: 3564 | SEQ ID NO: 5930 |
| rs2272991 | SEQ ID NO: 1199 | SEQ ID NO: 3565 | SEQ ID NO: 5931 |
| rs1362061 | SEQ ID NO: 1200 | SEQ ID NO: 3566 | SEQ ID NO: 5932 |
| rs3132377 | SEQ ID NO: 1201 | SEQ ID NO: 3567 | SEQ ID NO: 5933 |
| rs743771 | SEQ ID NO: 1202 | SEQ ID NO: 3568 | SEQ ID NO: 5934 |
| rs2523612 | SEQ ID NO: 1203 | SEQ ID NO: 3569 | SEQ ID NO: 5935 |
| rs4713220 | SEQ ID NO: 1204 | SEQ ID NO: 3570 | SEQ ID NO: 5936 |
| rs2301224 | SEQ ID NO: 1205 | SEQ ID NO: 3571 | SEQ ID NO: 5937 |
| rs3106191 | SEQ ID NO: 1206 | SEQ ID NO: 3572 | SEQ ID NO: 5938 |
| rs3749982 | SEQ ID NO: 1207 | SEQ ID NO: 3573 | SEQ ID NO: 5939 |
| rs1610678 | SEQ ID NO: 1208 | SEQ ID NO: 3574 | SEQ ID NO: S940 |
| rs2524055 | SEQ ID NO: 1209 | SEQ ID NO: 3575 | SEQ ID NO: 5941 |
| rs2073721 | SEQ ID NO: 1210 | SEQ ID NO: 3576 | SEQ ID NO: 5942 |
| rs3132496 | SEQ ID NO: 1211 | SEQ ID NO: 3577 | SEQ ID NO: 5943 |
| rs2071653 | SEQ ID NO: 1212 | SEQ ID NO: 3578 | SEQ ID NO: 5944 |
| rs7772982 | SEQ ID NO: 1213 | SEQ ID NO: 3579 | SEQ ID NO: 5945 |
| rs2524094 | SEQ ID NO: 1214 | SEQ ID NO: 3580 | SEQ ID NO: 5946 |
| rs2252863 | SEQ ID NO: 1215 | SEQ ID NO: 3581 | SEQ ID NO: 5947 |
| rs2532939 | SEQ ID NO: 1216 | SEQ ID NO: 3582 | SEQ ID NO: 5948 |
| rs3129793 | SEQ ID NO: 1217 | SEQ ID NO: 3583 | SEQ ID NO: 5949 |
| rs3130926 | SEQ ID NO: 1218 | SEQ ID NO: 3584 | SEQ ID NO: 5950 |
| rs707918 | SEQ ID NO: 1219 | SEQ ID NO: 3585 | SEQ ID NO: 5951 |
| rs6925178 | SEQ ID NO: 1220 | SEQ ID NO: 3586 | SEQ ID NO: 5952 |
| rs6456902 | SEQ ID NO: 1221 | SEQ ID NO: 3587 | SEQ ID NO: 5953 |
| rs1610682 | SEQ ID NO: 1222 | SEQ ID NO: 3588 | SEQ ID NO: 5954 |
| rs2073720 | SEQ ID NO: 1223 | SEQ ID NO: 3589 | SEQ ID NO: 5955 |
| rs2071785 | SEQ ID NO: 1224 | SEQ ID NO: 3590 | SEQ ID NO: 5956 |
| rs2856993 | SEQ ID NO: 1225 | SEQ ID NO: 3591 | SEQ ID NO: 5957 |
| rs4959012 | SEQ ID NO: 1226 | SEQ ID NO: 3592 | SEQ ID NO: 5958 |
| rs614549 | SEQ ID NO: 1227 | SEQ ID NO: 3593 | SEQ ID NO: 5959 |
| rs3749963 | SEQ ID NO: 1228 | SEQ ID NO: 3594 | SEQ ID NO: 5960 |
| rs3757324 | SEQ ID NO: 1229 | SEQ ID NO: 3595 | SEQ ID NO: 5961 |
| rs6457150 | SEQ ID NO: 1230 | SEQ ID NO: 3596 | SEQ ID NO: 5962 |
| rs915651 | SEQ ID NO: 1231 | SEQ ID NO: 3597 | SEQ ID NO: 5963 |
| rs3130456 | SEQ ID NO: 1232 | SEQ ID NO: 3598 | SEQ ID NO: 5964 |
| rs1150739 | SEQ ID NO: 1233 | SEQ ID NO: 3599 | SEQ ID NO: 5965 |
| rs1611617 | SEQ ID NO: 1234 | SEQ ID NO: 3600 | SEQ ID NO: 5966 |
| rs3094139 | SEQ ID NO: 1235 | SEQ ID NO: 3601 | SEQ ID NO: 5967 |
| rs2394414 | SEQ ID NO: 1236 | SEQ ID NO: 3602 | SEQ ID NO: 5968 |
| rs11724 | SEQ ID NO: 1237 | SEQ ID NO: 3603 | SEQ ID NO: 5969 |
| rs1611185 | SEQ ID NO: 1238 | SEQ ID NO: 3604 | SEQ ID NO: 5970 |
| rs6940440 | SEQ ID NO: 1239 | SEQ ID NO: 3605 | SEQ ID NO: 5971 |
| rs7452208 | SEQ ID NO: 1240 | SEQ ID NO: 3606 | SEQ ID NO: 5972 |
| rs3763342 | SEQ ID NO: 1241 | SEQ ID NO: 3607 | SEQ ID NO: 5973 |
| rs2518030 | SEQ ID NO: 1242 | SEQ ID NO: 3608 | SEQ ID NO: 5974 |
| rs7772174 | SEQ ID NO: 1243 | SEQ ID NO: 3609 | SEQ ID NO: 5975 |
| rs3869097 | SEQ ID NO: 1244 | SEQ ID NO: 3610 | SEQ ID NO: 5976 |
| rs2272593 | SEQ ID NO: 1245 | SEQ ID NO: 3611 | SEQ ID NO: 5977 |
| rs3129792 | SEQ ID NO: 1246 | SEQ ID NO: 3612 | SEQ ID NO: 5978 |
| rs1264305 | SEQ ID NO: 1247 | SEQ ID NO: 3613 | SEQ ID NO: 5979 |
| rs4959047 | SEQ ID NO: 1248 | SEQ ID NO: 3614 | SEQ ID NO: 5980 |
| rs4713436 | SEQ ID NO: 1249 | SEQ ID NO: 3615 | SEQ ID NO: 5981 |
| rs7829 | SEQ ID NO: 1250 | SEQ ID NO: 3616 | SEQ ID NO: 5982 |
| rs3094696 | SEQ ID NO: 1251 | SEQ ID NO: 3617 | SEQ ID NO: 5983 |
| rs3828881 | SEQ ID NO: 1252 | SEQ ID NO: 3618 | SEQ ID NO: 5984 |
| rs3094000 | SEQ ID NO: 1253 | SEQ ID NO: 3619 | SEQ ID NO: 5985 |
| rs2855440 | SEQ ID NO: 1254 | SEQ ID NO: 3620 | SEQ ID NO: 5986 |
| rs6457697 | SEQ ID NO: 1255 | SEQ ID NO: 3621 | SEQ ID NO: 5987 |
| rs6919044 | SEQ ID NO: 1256 | SEQ ID NO: 3622 | SEQ ID NO: 5988 |
| rs1013518 | SEQ ID NO: 1257 | SEQ ID NO: 3623 | SEQ ID NO: 5989 |
| rs2144426 | SEQ ID NO: 1258 | SEQ ID NO: 3624 | SEQ ID NO: 5990 |
| rs4267952 | SEQ ID NO: 1259 | SEQ ID NO: 3625 | SEQ ID NO: 5991 |
| rs4947339 | SEQ ID NO: 1260 | SEQ ID NO: 3626 | SEQ ID NO: 5992 |
| rs4618569 | SEQ ID NO: 1261 | SEQ ID NO: 3627 | SEQ ID NO: 5993 |
| rs7767288 | SEQ ID NO: 1262 | SEQ ID NO: 3628 | SEQ ID NO: 5994 |
| rs3752528 | SEQ ID NO: 1263 | SEQ ID NO: 3629 | SEQ ID NO: 5995 |
| rs3956986 | SEQ ID NO: 1264 | SEQ ID NO: 3630 | SEQ ID NO: 5996 |
| rs2285320 | SEQ ID NO: 1265 | SEQ ID NO: 3631 | SEQ ID NO: 5997 |
| rs6938690 | SEQ ID NO: 1266 | SEQ ID NO: 3632 | SEQ ID NO: 5998 |
| rs2532932 | SEQ ID NO: 1267 | SEQ ID NO: 3633 | SEQ ID NO: 5999 |
| rs1634725 | SEQ ID NO: 1268 | SEQ ID NO: 3634 | SEQ ID NO: 6000 |
| rs3117097 | SEQ ID NO: 1269 | SEQ ID NO: 3635 | SEQ ID NO: 6001 |
| rs2621421 | SEQ ID NO: 1270 | SEQ ID NO: 3636 | SEQ ID NO: 6002 |
| rs2076541 | SEQ ID NO: 1271 | SEQ ID NO: 3637 | SEQ ID NO: 6003 |
| rs3094613 | SEQ ID NO: 1272 | SEQ ID NO: 3638 | SEQ ID NO: 6004 |
| rs4711186 | SEQ ID NO: 1273 | SEQ ID NO: 3639 | SEQ ID NO: 6005 |
| rs3130165 | SEQ ID NO: 1274 | SEQ ID NO: 3640 | SEQ ID NO: 6006 |
| rs2395312 | SEQ ID NO: 1275 | SEQ ID NO: 3641 | SEQ ID NO: 6007 |
| rs1627764 | SEQ ID NO: 1276 | SEQ ID NO: 3642 | SEQ ID NO: 6008 |
| rs204896 | SEQ ID NO: 1277 | SEQ ID NO: 3643 | SEQ ID NO: 6009 |
| rs7750714 | SEQ ID NO: 1278 | SEQ ID NO: 3644 | SEQ ID NO: 6010 |
| rs1054684 | SEQ ID NO: 1279 | SEQ ID NO: 3645 | SEQ ID NO: 6011 |
| rs7768931 | SEQ ID NO: 1280 | SEQ ID NO: 3646 | SEQ ID NO: 6012 |
| rs2213573 | SEQ ID NO: 1281 | SEQ ID NO: 3647 | SEQ ID NO: 6013 |
| rs241410 | SEQ ID NO: 1282 | SEQ ID NO: 3648 | SEQ ID NO: 6014 |
| rs2523734 | SEQ ID NO: 1283 | SEQ ID NO: 3649 | SEQ ID NO: 6015 |
| rs2163472 | SEQ ID NO: 1284 | SEQ ID NO: 3650 | SEQ ID NO: 6016 |
| rs6930003 | SEQ ID NO: 1285 | SEQ ID NO: 3651 | SEQ ID NO: 6017 |
| rs4713193 | SEQ ID NO: 1286 | SEQ ID NO: 3652 | SEQ ID NO: 6018 |
| rs1264321 | SEQ ID NO: 1287 | SEQ ID NO: 3653 | SEQ ID NO: 6019 |
| rs204878 | SEQ ID NO: 1288 | SEQ ID NO: 3654 | SEQ ID NO: 6020 |
| rs2301752 | SEQ ID NO: 1289 | SEQ ID NO: 3655 | SEQ ID NO: 6021 |
| rs6901830 | SEQ ID NO: 1290 | SEQ ID NO: 3656 | SEQ ID NO: 6022 |
| rs3998159 | SEQ ID NO: 1291 | SEQ ID NO: 3657 | SEQ ID NO: 6023 |
| rs2246986 | SEQ ID NO: 1292 | SEQ ID NO: 3658 | SEQ ID NO: 6024 |
| rs3117113 | SEQ ID NO: 1293 | SEQ ID NO: 3659 | SEQ ID NO: 6025 |
| rs2857128 | SEQ ID NO: 1294 | SEQ ID NO: 3660 | SEQ ID NO: 6026 |
| rs2516643 | SEQ ID NO: 1295 | SEQ ID NO: 3661 | SEQ ID NO: 6027 |
| rs3117103 | SEQ ID NO: 1296 | SEQ ID NO: 3662 | SEQ ID NO: 6028 |
| rs2233965 | SEQ ID NO: 1297 | SEQ ID NO: 3663 | SEQ ID NO: 6029 |
| rs6916394 | SEQ ID NO: 1298 | SEQ ID NO: 3664 | SEQ ID NO: 6030 |
| rs2074485 | SEQ ID NO: 1299 | SEQ ID NO: 3665 | SEQ ID NO: 6031 |
| rs1619893 | SEQ ID NO: 1300 | SEQ ID NO: 3666 | SEQ ID NO: 6032 |
| rs4449615 | SEQ ID NO: 1301 | SEQ ID NO: 3667 | SEQ ID NO: 6033 |
| rs3115611 | SEQ ID NO: 1302 | SEQ ID NO: 3668 | SEQ ID NO: 6034 |
| rs2301748 | SEQ ID NO: 1303 | SEQ ID NO: 3669 | SEQ ID NO: 6035 |
| rs3129845 | SEQ ID NO: 1304 | SEQ ID NO: 3670 | SEQ ID NO: 6036 |
| rs3130829 | SEQ ID NO: 1305 | SEQ ID NO: 3671 | SEQ ID NO: 6037 |
| rs6457125 | SEQ ID NO: 1306 | SEQ ID NO: 3672 | SEQ ID NO: 6038 |
| rs2571402 | SEQ ID NO: 1307 | SEQ ID NO: 3673 | SEQ ID NO: 6039 |
| rs2157605 | SEQ ID NO: 1308 | SEQ ID NO: 3674 | SEQ ID NO: 6040 |
| rs2275853 | SEQ ID NO: 1309 | SEQ ID NO: 3675 | SEQ ID NO: 6041 |
| rs3132710 | SEQ ID NO: 1310 | SEQ ID NO: 3676 | SEQ ID NO: 6042 |
| rs2854005 | SEQ ID NO: 1311 | SEQ ID NO: 3677 | SEQ ID NO: 6043 |
| rs1011985 | SEQ ID NO: 1312 | SEQ ID NO: 3678 | SEQ ID NO: 6044 |
| rs2075789 | SEQ ID NO: 1313 | SEQ ID NO: 3679 | SEQ ID NO: 6045 |
| rs2076182 | SEQ ID NO: 1314 | SEQ ID NO: 3680 | SEQ ID NO: 6046 |
| rs3132684 | SEQ ID NO: 1315 | SEQ ID NO: 3681 | SEQ ID NO: 6047 |
| rs238877 | SEQ ID NO: 1316 | SEQ ID NO: 3682 | SEQ ID NO: 6048 |
| rs2072681 | SEQ ID NO: 1317 | SEQ ID NO: 3683 | SEQ ID NO: 6049 |
| rs6919908 | SEQ ID NO: 1318 | SEQ ID NO: 3684 | SEQ ID NO: 6050 |
| rs2647045 | SEQ ID NO: 1319 | SEQ ID NO: 3685 | SEQ ID NO: 6051 |
| rs1632986 | SEQ ID NO: 1320 | SEQ ID NO: 3686 | SEQ ID NO: 6052 |
| rs2395470 | SEQ ID NO: 1321 | SEQ ID NO: 3687 | SEQ ID NO: 6053 |
| rs915668 | SEQ ID NO: 1322 | SEQ ID NO: 3688 | SEQ ID NO: 6054 |
| rs2295119 | SEQ ID NO: 1323 | SEQ ID NO: 3689 | SEQ ID NO: 6055 |
| rs2071536 | SEQ ID NO: 1324 | SEQ ID NO: 3690 | SEQ ID NO: 6056 |
| rs3130827 | SEQ ID NO: 1325 | SEQ ID NO: 3691 | SEQ ID NO: 6057 |
| rs3093556 | SEQ ID NO: 1326 | SEQ ID NO: 3692 | SEQ ID NO: 6058 |
| rs3734818 | SEQ ID NO: 1327 | SEQ ID NO: 3693 | SEQ ID NO: 6059 |
| rs4713270 | SEQ ID NO: 1328 | SEQ ID NO: 3694 | SEQ ID NO: 6060 |
| rs1988565 | SEQ ID NO: 1329 | SEQ ID NO: 3695 | SEQ ID NO: 6061 |
| rs1233333 | SEQ ID NO: 1330 | SEQ ID NO: 3696 | SEQ ID NO: 6062 |
| rs2074489 | SEQ ID NO: 1331 | SEQ ID NO: 3697 | SEQ ID NO: 6063 |
| rs1736981 | SEQ ID NO: 1332 | SEQ ID NO: 3698 | SEQ ID NO: 6064 |
| rs3129005 | SEQ ID NO: 1333 | SEQ ID NO: 3699 | SEQ ID NO: 6065 |
| rs3998357 | SEQ ID NO: 1334 | SEQ ID NO: 3700 | SEQ ID NO: 6066 |
| rs3132645 | SEQ ID NO: 1335 | SEQ ID NO: 3701 | SEQ ID NO: 6067 |
| rs1264548 | SEQ ID NO: 1336 | SEQ ID NO: 3702 | SEQ ID NO: 6068 |
| rs2428495 | SEQ ID NO: 1337 | SEQ ID NO: 3703 | SEQ ID NO: 6069 |
| rs3817824 | SEQ ID NO: 1338 | SEQ ID NO: 3704 | SEQ ID NO: 6070 |
| rs1632948 | SEQ ID NO: 1339 | SEQ ID NO: 3705 | SEQ ID NO: 6071 |
| rs1736998 | SEQ ID NO: 1340 | SEQ ID NO: 3706 | SEQ ID NO: 6072 |
| rs2535252 | SEQ ID NO: 1341 | SEQ ID NO: 3707 | SEQ ID NO: 6073 |
| rs1625485 | SEQ ID NO: 1342 | SEQ ID NO: 3708 | SEQ ID NO: 6074 |
| rs1811197 | SEQ ID NO: 1343 | SEQ ID NO: 3709 | SEQ ID NO: 6075 |
| rs2524173 | SEQ ID NO: 1344 | SEQ ID NO: 3710 | SEQ ID NO: 6076 |
| rs6925580 | SEQ ID NO: 1345 | SEQ ID NO: 3711 | SEQ ID NO: 6077 |
| rs3828903 | SEQ ID NO: 1346 | SEQ ID NO: 3712 | SEQ ID NO: 6078 |
| rs2596450 | SEQ ID NO: 1347 | SEQ ID NO: 3713 | SEQ ID NO: 6079 |
| rs6457042 | SEQ ID NO: 1348 | SEQ ID NO: 3714 | SEQ ID NO: 6080 |
| rs1799908 | SEQ ID NO: 1349 | SEQ ID NO: 3715 | SEQ ID NO: 6081 |
| rs8365 | SEQ ID NO: 1350 | SEQ ID NO: 3716 | SEQ ID NO: 6082 |
| rs3823340 | SEQ ID NO: 1351 | SEQ ID NO: 3717 | SEQ ID NO: 6083 |
| rs1611589 | SEQ ID NO: 1352 | SEQ ID NO: 3718 | SEQ ID NO: 6084 |
| rs2071291 | SEQ ID NO: 1353 | SEQ ID NO: 3719 | SEQ ID NO: 6085 |
| rs1233387 | SEQ ID NO: 1354 | SEQ ID NO: 3720 | SEQ ID NO: 6086 |
| rs6920823 | SEQ ID NO: 1355 | SEQ ID NO: 3721 | SEQ ID NO: 6087 |
| rs2251731 | SEQ ID NO: 1356 | SEQ ID NO: 3722 | SEQ ID NO: 6088 |
| rs6920830 | SEQ ID NO: 1357 | SEQ ID NO: 3723 | SEQ ID NO: 6089 |
| rs3873375 | SEQ ID NO: 1358 | SEQ ID NO: 3724 | SEQ ID NO: 6090 |
| rs1737004 | SEQ ID NO: 1359 | SEQ ID NO: 3725 | SEQ ID NO: 6091 |
| rs6457611 | SEQ ID NO: 1360 | SEQ ID NO: 3726 | SEQ ID NO: 6092 |
| rs2524088 | SEQ ID NO: 1361 | SEQ ID NO: 3727 | SEQ ID NO: 6093 |
| rs3749962 | SEQ ID NO: 1362 | SEQ ID NO: 3728 | SEQ ID NO: 6094 |
| rs1737085 | SEQ ID NO: 1363 | SEQ ID NO: 3729 | SEQ ID NO: 6095 |
| rs7382817 | SEQ ID NO: 1364 | SEQ ID NO: 3730 | SEQ ID NO: 6096 |
| rs2394413 | SEQ ID NO: 1365 | SEQ ID NO: 3731 | SEQ ID NO: 6097 |
| rs2073151 | SEQ ID NO: 1366 | SEQ ID NO: 3732 | SEQ ID NO: 6098 |
| rs1058026 | SEQ ID NO: 1367 | SEQ ID NO: 3733 | SEQ ID NO: 6099 |
| rs2272873 | SEQ ID NO: 1368 | SEQ ID NO: 3734 | SEQ ID NO: 6100 |
| rs1632933 | SEQ ID NO: 1369 | SEQ ID NO: 3735 | SEQ ID NO: 6101 |
| rs1632939 | SEQ ID NO: 1370 | SEQ ID NO: 3736 | SEQ ID NO: 6102 |
| rs3132704 | SEQ ID NO: 1371 | SEQ ID NO: 3737 | SEQ ID NO: 6103 |
| rs2523611 | SEQ ID NO: 1372 | SEQ ID NO: 3738 | SEQ ID NO: 6104 |
| rs3823313 | SEQ ID NO: 1373 | SEQ ID NO: 3739 | SEQ ID NO: 6105 |
| rs2524083 | SEQ ID NO: 1374 | SEQ ID NO: 3740 | SEQ ID NO: 6106 |
| rs983561 | SEQ ID NO: 1375 | SEQ ID NO: 3741 | SEQ ID NO: 6107 |
| rs915660 | SEQ ID NO: 1376 | SEQ ID NO: 3742 | SEQ ID NO: 6108 |
| rs1269839 | SEQ ID NO: 1377 | SEQ ID NO: 3743 | SEQ ID NO: 6109 |
| rs2050190 | SEQ ID NO: 1378 | SEQ ID NO: 3744 | SEQ ID NO: 6110 |
| rs8408 | SEQ ID NO: 1379 | SEQ ID NO: 3745 | SEQ ID NO: 6111 |
| rs3115573 | SEQ ID NO: 1380 | SEQ ID NO: 3746 | SEQ ID NO: 6112 |
| rs2230365 | SEQ ID NO: 1381 | SEQ ID NO: 3747 | SEQ ID NO: 6113 |
| rs2284178 | SEQ ID NO: 1382 | SEQ ID NO: 3748 | SEQ ID NO: 6114 |
| rs720467 | SEQ ID NO: 1383 | SEQ ID NO: 3749 | SEQ ID NO: 6115 |
| rs1842399 | SEQ ID NO: 1384 | SEQ ID NO: 3750 | SEQ ID NO: 6116 |
| rs2857106 | SEQ ID NO: 1385 | SEQ ID NO: 3751 | SEQ ID NO: 6117 |
| rs1894552 | SEQ ID NO: 1386 | SEQ ID NO: 3752 | SEQ ID NO: 6118 |
| rs1048664 | SEQ ID NO: 1387 | SEQ ID NO: 3753 | SEQ ID NO: 6119 |
| rs2076529 | SEQ ID NO: 1388 | SEQ ID NO: 3754 | SEQ ID NO: 6120 |
| rs2269422 | SEQ ID NO: 1389 | SEQ ID NO: 3755 | SEQ ID NO: 6121 |
| rs3135338 | SEQ ID NO: 1390 | SEQ ID NO: 3756 | SEQ ID NO: 6122 |
| rs3129907 | SEQ ID NO: 1391 | SEQ ID NO: 3757 | SEQ ID NO: 6123 |
| rs2621413 | SEQ ID NO: 1392 | SEQ ID NO: 3758 | SEQ ID NO: 6124 |
| rs3129848 | SEQ ID NO: 1393 | SEQ ID NO: 3759 | SEQ ID NO: 6125 |
| rs2395253 | SEQ ID NO: 1394 | SEQ ID NO: 3760 | SEQ ID NO: 6126 |
| rs3135365 | SEQ ID NO: 1395 | SEQ ID NO: 3761 | SEQ ID NO: 6127 |
| rs2395106 | SEQ ID NO: 1396 | SEQ ID NO: 3762 | SEQ ID NO: 6128 |
| rs2285796 | SEQ ID NO: 1397 | SEQ ID NO: 3763 | SEQ ID NO: 6129 |
| rs2284177 | SEQ ID NO: 1398 | SEQ ID NO: 3764 | SEQ ID NO: 6130 |
| rs3115563 | SEQ ID NO: 1399 | SEQ ID NO: 3765 | SEQ ID NO: 6131 |
| rs2074477 | SEQ ID NO: 1400 | SEQ ID NO: 3766 | SEQ ID NO: 6132 |
| rs2301755 | SEQ ID NO: 1401 | SEQ ID NO: 3767 | SEQ ID NO: 6133 |
| rs2057727 | SEQ ID NO: 1402 | SEQ ID NO: 3768 | SEQ ID NO: 6134 |
| rs2269705 | SEQ ID NO: 1403 | SEQ ID NO: 3769 | SEQ ID NO: 6135 |
| rs2076177 | SEQ ID NO: 1404 | SEQ ID NO: 3770 | SEQ ID NO: 6136 |
| rs2071285 | SEQ ID NO: 1405 | SEQ ID NO: 3771 | SEQ ID NO: 6137 |
| rs1109146 | SEQ ID NO: 1406 | SEQ ID NO: 3772 | SEQ ID NO: 6138 |
| rs2395178 | SEQ ID NO: 1407 | SEQ ID NO: 3773 | SEQ ID NO: 6139 |
| rs1978029 | SEQ ID NO: 1408 | SEQ ID NO: 3774 | SEQ ID NO: 6140 |
| rs408359 | SEQ ID NO: 1409 | SEQ ID NO: 3775 | SEQ ID NO: 6141 |
| rs2239529 | SEQ ID NO: 1410 | SEQ ID NO: 3776 | SEQ ID NO: 6142 |
| rs2269425 | SEQ ID NO: 1411 | SEQ ID NO: 3777 | SEQ ID NO: 6143 |
| rs2073048 | SEQ ID NO: 1412 | SEQ ID NO: 3778 | SEQ ID NO: 6144 |
| rs3806155 | SEQ ID NO: 1413 | SEQ ID NO: 3779 | SEQ ID NO: 6145 |
| rs436845 | SEQ ID NO: 1414 | SEQ ID NO: 3780 | SEQ ID NO: 6146 |
| rs434841 | SEQ ID NO: 1415 | SEQ ID NO: 3781 | SEQ ID NO: 6147 |
| rs1555115 | SEQ ID NO: 1416 | SEQ ID NO: 3782 | SEQ ID NO: 6148 |
| rs2284174 | SEQ ID NO: 1417 | SEQ ID NO:3783 | SEQ ID NO: 6149 |
| rs2239806 | SEQ ID NO: 1418 | SEQ ID NO: 3784 | SEQ ID NO: 6150 |
| rs1610714 | SEQ ID NO: 1419 | SEQ ID NO: 3785 | SEQ ID NO: 6151 |
| rs2071289 | SEQ ID NO: 1420 | SEQ ID NO: 3786 | SEQ ID NO: 6152 |
| rs1264302 | SEQ ID NO: 1421 | SEQ ID NO: 3787 | SEQ ID NO: 6153 |
| rs1265099 | SEQ ID NO: 1422 | SEQ ID NO: 3788 | SEQ ID NO: 6154 |
| rs926070 | SEQ ID NO: 1423 | SEQ ID NO: 3789 | SEQ ID NO: 6155 |
| rs1150738 | SEQ ID NO: 1424 | SEQ ID NO: 3790 | SEQ ID NO: 6156 |
| rs2075015 | SEQ ID NO: 1425 | SEQ ID NO: 3791 | SEQ ID NO: 6157 |
| rs1576 | SEQ ID NO: 1426 | SEQ ID NO: 3792 | SEQ ID NO: 6158 |
| rs2074482 | SEQ ID NO: 1427 | SEQ ID NO: 3793 | SEQ ID NO: 6159 |
| rs2076523 | SEQ ID NO: 1428 | SEQ ID NO: 3794 | SEQ ID NO: 6160 |
| rs2395182 | SEQ ID NO: 1429 | SEQ ID NO: 3795 | SEQ ID NO: 6161 |
| rs241429 | SEQ ID NO: 1430 | SEQ ID NO: 3796 | SEQ ID NO: 6162 |
| rs565448 | SEQ ID NO: 1431 | SEQ ID NO: 3797 | SEQ ID NO: 6163 |
| rs1383265 | SEQ ID NO: 1432 | SEQ ID NO: 3798 | SEQ ID NO: 6164 |
| rs1150771 | SEQ ID NO: 1433 | SEQ ID NO: 3799 | SEQ ID NO: 6165 |
| rs2284189 | SEQ ID NO: 1434 | SEQ ID NO: 3800 | SEQ ID NO: 6166 |
| rs3213484 | SEQ ID NO: 1435 | SEQ ID NO: 3801 | SEQ ID NO: 6167 |
| rs2856716 | SEQ ID NO: 1436 | SEQ ID NO: 3802 | SEQ ID NO: 6168 |
| rs2076526 | SEQ ID NO: 1437 | SEQ ID NO: 3803 | SEQ ID NO: 6169 |
| rs3830122 | SEQ ID NO: 1438 | SEQ ID NO: 3804 | SEQ ID NO: 6170 |
| rs1882 | SEQ ID NO: 1439 | SEQ ID NO: 3805 | SEQ ID NO: 6171 |
| rs512559 | SEQ ID NO: 1440 | SEQ ID NO: 3806 | SEQ ID NO: 6172 |
| rs2857102 | SEQ ID NO: 1441 | SEQ ID NO: 3807 | SEQ ID NO: 6173 |
| rs2856698 | SEQ ID NO: 1442 | SEQ ID NO: 3808 | SEQ ID NO: 6174 |
| rs204989 | SEQ ID NO: 1443 | SEQ ID NO: 3809 | SEQ ID NO: 6175 |
| rs419788 | SEQ ID NO: 1444 | SEQ ID NO: 3810 | SEQ ID NO: 6176 |
| rs986475 | SEQ ID NO: 1445 | SEQ ID NO: 3811 | SEQ ID NO: 6177 |
| rs2763979 | SEQ ID NO: 1446 | SEQ ID NO: 3812 | SEQ ID NO: 6178 |
| rs1062470 | SEQ ID NO: 1447 | SEQ ID NO: 3813 | SEQ ID NO: 6179 |
| rs2523668 | SEQ ID NO: 1448 | SEQ ID NO: 3814 | SEQ ID NO: 6180 |
| rs2524069 | SEQ ID NO: 1449 | SEQ ID NO: 3815 | SEQ ID NO: 6181 |
| rs3135339 | SEQ ID NO: 1450 | SEQ ID NO: 3816 | SEQ ID NO: 6182 |
| rs206776 | SEQ ID NO: 1451 | SEQ ID NO: 3817 | SEQ ID NO: 6183 |
| rs1237485 | SEQ ID NO: 1452 | SEQ ID NO: 3818 | SEQ ID NO: 6184 |
| rs805290 | SEQ ID NO: 1453 | SEQ ID NO: 3819 | SEQ ID NO: 6185 |
| rs805268 | SEQ ID NO: 1454 | SEQ ID NO: 3820 | SEQ ID NO: 6186 |
| rs1345228 | SEQ ID NO: 1455 | SEQ ID NO: 3821 | SEQ ID NO: 6187 |
| rs7742523 | SEQ ID NO: 1456 | SEQ ID NO: 3822 | SEQ ID NO: 6188 |
| rs1053924 | SEQ ID NO: 1457 | SEQ ID NO: 3823 | SEQ ID NO: 6189 |
| rs1270942 | SEQ ID NO: 1458 | SEQ ID NO: 3824 | SEQ ID NO: 6190 |
| rs3129872 | SEQ ID NO: 1459 | SEQ ID NO: 3825 | SEQ ID NO: 6191 |
| rs805256 | SEQ ID NO: 1460 | SEQ ID NO: 3826 | SEQ ID NO: 6192 |
| rs3116998 | SEQ ID NO: 1461 | SEQ ID NO: 3827 | SEQ ID NO: 6193 |
| rs2517484 | SEQ ID NO: 1462 | SEQ ID NO: 3828 | SEQ ID NO: 6194 |
| rs886398 | SEQ ID NO: 1463 | SEQ ID NO: 3829 | SEQ ID NO: 6195 |
| rs984778 | SEQ ID NO: 1464 | SEQ ID NO: 3830 | SEQ ID NO: 6196 |
| rs1819784 | SEQ ID NO: 1465 | SEQ ID NO: 3831 | SEQ ID NO: 6197 |
| rs537757 | SEQ ID NO: 1466 | SEQ ID NO: 3832 | SEQ ID NO: 6198 |
| rs213199 | SEQ ID NO: 1467 | SEQ ID NO: 3833 | SEQ ID NO: 6199 |
| rs7762289 | SEQ ID NO: 1468 | SEQ ID NO: 3834 | SEQ ID NO: 6200 |
| rs1264709 | SEQ ID NO: 1469 | SEQ ID NO: 3835 | SEQ ID NO: 6201 |
| rs2071352 | SEQ ID NO: 1470 | SEQ ID NO: 3836 | SEQ ID NO: 6202 |
| rs2213584 | SEQ ID NO: 1471 | SEQ ID NO: 3837 | SEQ ID NO: 6203 |
| rs7382138 | SEQ ID NO: 1472 | SEQ ID NO: 3838 | SEQ ID NO: 6204 |
| rs660550 | SEQ ID NO: 1473 | SEQ ID NO: 3839 | SEQ ID NO: 6205 |
| rs3094626 | SEQ ID NO: 1474 | SEQ ID NO: 3840 | SEQ ID NO: 6206 |
| rs130078 | SEQ ID NO: 1475 | SEQ ID NO: 3841 | SEQ ID NO: 6207 |
| rs1610647 | SEQ ID NO: 1476 | SEQ ID NO: 3842 | SEQ ID NO: 6208 |
| rs2071594 | SEQ ID NO: 1477 | SEQ ID NO: 3843 | SEQ ID NO: 6209 |
| rs393603 | SEQ ID NO: 1478 | SEQ ID NO: 3844 | SEQ ID NO: 6210 |
| rs1034325 | SEQ ID NO: 1479 | SEQ ID NO: 3845 | SEQ ID NO: 6211 |
| rs971570 | SEQ ID NO: 1480 | SEQ ID NO: 3846 | SEQ ID NO: 6212 |
| rs3115635 | SEQ ID NO: 1481 | SEQ ID NO: 3847 | SEQ ID NO: 6213 |
| rs2524172 | SEQ ID NO: 1482 | SEQ ID NO: 3848 | SEQ ID NO: 6214 |
| rs2523746 | SEQ ID NO: 1483 | SEQ ID NO: 3849 | SEQ ID NO: 6215 |
| rs1362069 | SEQ ID NO: 1484 | SEQ ID NO: 3850 | SEQ ID NO: 6216 |
| rs3129203 | SEQ ID NO: 1485 | SEQ ID NO: 3851 | SEQ ID NO: 6217 |
| rs3871248 | SEQ ID NO: 1486 | SEQ ID NO: 3852 | SEQ ID NO: 6218 |
| rs4248157 | SEQ ID NO: 1487 | SEQ ID NO: 3853 | SEQ ID NO: 6219 |
| rs3130140 | SEQ ID NO: 1488 | SEQ ID NO: 3854 | SEQ ID NO: 6220 |
| rs2524100 | SEQ ID NO: 1489 | SEQ ID NO: 3855 | SEQ ID NO: 6221 |
| rs1800625 | SEQ ID NO: 1490 | SEQ ID NO: 3856 | SEQ ID NO: 6222 |
| rs2239709 | SEQ ID NO: 1491 | SEQ ID NO: 3857 | SEQ ID NO: 6223 |
| rs241439 | SEQ ID NO: 1492 | SEQ ID NO: 3858 | SEQ ID NO: 6224 |
| rs6907291 | SEQ ID NO: 1493 | SEQ ID NO: 3859 | SEQ ID NO: 6225 |
| rs6917477 | SEQ ID NO: 1494 | SEQ ID NO: 3860 | SEQ ID NO: 6226 |
| rs6923504 | SEQ ID NO: 1495 | SEQ ID NO: 3861 | SEQ ID NO: 6227 |
| rs6906021 | SEQ ID NO: 1496 | SEQ ID NO: 3862 | SEQ ID NO: 6228 |
| rs2849015 | SEQ ID NO: 1497 | SEQ ID NO: 3863 | SEQ ID NO: 6229 |
| rs2517462 | SEQ ID NO: 1498 | SEQ ID NO: 3864 | SEQ ID NO: 6230 |
| rs7382297 | SEQ ID NO: 1499 | SEQ ID NO: 3865 | SEQ ID NO: 6231 |
| rs6457713 | SEQ ID NO: 1500 | SEQ ID NO: 3866 | SEQ ID NO: 6232 |
| rs1075496 | SEQ ID NO: 1501 | SEQ ID NO: 3867 | SEQ ID NO: 6233 |
| rs3131083 | SEQ ID NO: 1502 | SEQ ID NO: 3868 | SEQ ID NO: 6234 |
| rs2256965 | SEQ ID NO: 1503 | SEQ ID NO: 3869 | SEQ ID NO: 6235 |
| rs3093662 | SEQ ID NO: 1504 | SEQ ID NO: 3870 | SEQ ID NO: 6236 |
| rs2395305 | SEQ ID NO: 1505 | SEQ ID NO: 3871 | SEQ ID NO: 6237 |
| rs3763304 | SEQ ID NO: 1506 | SEQ ID NO: 3872 | SEQ ID NO: 6238 |
| rs2227126 | SEQ ID NO: 1507 | SEQ ID NO: 3873 | SEQ ID NO: 6239 |
| rs261946 | SEQ ID NO: 1508 | SEQ ID NO: 3874 | SEQ ID NO: 6240 |
| rs4987411 | SEQ ID NO: 1509 | SEQ ID NO: 3875 | SEQ ID NO: 6241 |
| rs1633017 | SEQ ID NO: 1510 | SEQ ID NO: 3876 | SEQ ID NO: 6242 |
| rs7382061 | SEQ ID NO: 1511 | SEQ ID NO: 3877 | SEQ ID NO: 6243 |
| rs3129980 | SEQ ID NO: 1512 | SEQ ID NO: 3878 | SEQ ID NO: 6244 |
| rs3734838 | SEQ ID NO: 1513 | SEQ ID NO: 3879 | SEQ ID NO: 6245 |
| rs3129073 | SEQ ID NO: 1514 | SEQ ID NO: 3880 | SEQ ID NO: 6246 |
| rs1063355 | SEQ ID NO: 1515 | SEQ ID NO: 3881 | SEQ ID NO: 6247 |
| rs994321 | SEQ ID NO: 1516 | SEQ ID NO: 3882 | SEQ ID NO: 6248 |
| rs3129809 | SEQ ID NO: 1517 | SEQ ID NO: 3883 | SEQ ID NO: 6249 |
| rs7766854 | SEQ ID NO: 1518 | SEQ ID NO: 3884 | SEQ ID NO: 6250 |
| rs3763288 | SEQ ID NO: 1519 | SEQ ID NO: 3885 | SEQ ID NO: 6251 |
| rs630379 | SEQ ID NO: 1520 | SEQ ID NO: 3886 | SEQ ID NO: 6252 |
| rs2844845 | SEQ ID NO: 1521 | SEQ ID NO: 3887 | SEQ ID NO: 6253 |
| rs3130666 | SEQ ID NO: 1522 | SEQ ID NO: 3888 | SEQ ID NO: 6254 |
| rs2021723 | SEQ ID NO: 1523 | SEQ ID NO: 3889 | SEQ ID NO: 6255 |
| rs1634718 | SEQ ID NO: 1524 | SEQ ID NO: 3890 | SEQ ID NO: 6256 |
| rs1264539 | SEQ ID NO: 1525 | SEQ ID NO: 3891 | SEQ ID NO: 6257 |
| rs2844748 | SEQ ID NO: 1526 | SEQ ID NO: 3892 | SEQ ID NO: 6258 |
| rs805292 | SEQ ID NO: 1527 | SEQ ID NO: 3893 | SEQ ID NO: 6259 |
| rs7741884 | SEQ ID NO: 1528 | SEQ ID NO: 3894 | SEQ ID NO: 6260 |
| rs2245420 | SEQ ID NO: 1529 | SEQ ID NO: 3895 | SEQ ID NO: 6261 |
| rs259940 | SEQ ID NO: 1530 | SEQ ID NO: 3896 | SEQ ID NO: 6262 |
| rs2853935 | SEQ ID NO: 1531 | SEQ ID NO: 3897 | SEQ ID NO: 6263 |
| rs6911467 | SEQ ID NO: 1532 | SEQ ID NO: 3898 | SEQ ID NO: 6264 |
| rs3132712 | SEQ ID NO: 1533 | SEQ ID NO: 3899 | SEQ ID NO: 6265 |
| rs3763317 | SEQ ID NO: 1534 | SEQ ID NO: 3900 | SEQ ID NO: 6266 |
| rs2853939 | SEQ ID NO: 1535 | SEQ ID NO: 3901 | SEQ ID NO: 6267 |
| rs605203 | SEQ ID NO: 1536 | SEQ ID NO: 3902 | SEQ ID NO: 6268 |
| rs6457594 | SEQ ID NO: 1537 | SEQ ID NO: 3903 | SEQ ID NO: 6269 |
| rs2144014 | SEQ ID NO: 1538 | SEQ ID NO: 3904 | SEQ ID NO: 6270 |
| rs2534790 | SEQ ID NO: 1539 | SEQ ID NO: 3905 | SEQ ID NO: 6271 |
| rs986522 | SEQ ID NO: 1540 | SEQ ID NO: 3906 | SEQ ID NO: 6272 |
| rs805264 | SEQ ID NO: 1541 | SEQ ID NO: 3907 | SEQ ID NO: 6273 |
| rs7757269 | SEQ ID NO: 1542 | SEQ ID NO: 3908 | SEQ ID NO: 6274 |
| rs916570 | SEQ ID NO: 1543 | SEQ ID NO: 3909 | SEQ ID NO: 6275 |
| rs3093668 | SEQ ID NO: 1544 | SEQ ID NO: 3910 | SEQ ID NO: 6276 |
| rs928824 | SEQ ID NO: 1545 | SEQ ID NO: 3911 | SEQ ID NO: 6277 |
| rs3132682 | SEQ ID NO: 1546 | SEQ ID NO: 3912 | SEQ ID NO: 6278 |
| rs4248148 | SEQ ID NO: 1547 | SEQ ID NO: 3913 | SEQ ID NO: 6279 |
| rs707928 | SEQ ID NO: 1548 | SEQ ID NO: 3914 | SEQ ID NO: 6280 |
| rs3130375 | SEQ ID NO: 1549 | SEQ ID NO: 3915 | SEQ ID NO: 6281 |
| rs3097644 | SEQ ID NO: 1550 | SEQ ID NO: 3916 | SEQ ID NO: 6282 |
| rs1233397 | SEQ ID NO: 1551 | SEQ ID NO: 3917 | SEQ ID NO: 6283 |
| rs2023371 | SEQ ID NO: 1552 | SEQ ID NO: 3918 | SEQ ID NO: 6284 |
| rs2071540 | SEQ ID NO: 1553 | SEQ ID NO: 3919 | SEQ ID NO: 6285 |
| rs4713603 | SEQ ID NO: 1554 | SEQ ID NO: 3920 | SEQ ID NO: 6286 |
| rs3094014 | SEQ ID NO: 1555 | SEQ ID NO: 3921 | SEQ ID NO: 6287 |
| rs2856726 | SEQ ID NO: 1556 | SEQ ID NO: 3922 | SEQ ID NO: 6288 |
| rs2735005 | SEQ ID NO: 1557 | SEQ ID NO: 3923 | SEQ ID NO: 6289 |
| rs241414 | SEQ ID NO: 1558 | SEQ ID NO: 3924 | SEQ ID NO: 6290 |
| rs2516400 | SEQ ID NO: 1559 | SEQ ID NO: 3925 | SEQ ID NO: 6291 |
| rs2517416 | SEQ ID NO: 1560 | SEQ ID NO: 3926 | SEQ ID NO: 6292 |
| rs3749971 | SEQ ID NO: 1561 | SEQ ID NO: 3927 | SEQ ID NO: 6293 |
| rs6928431 | SEQ ID NO: 1562 | SEQ ID NO: 3928 | SEQ ID NO: 6294 |
| rs6911693 | SEQ ID NO: 1563 | SEQ ID NO: 3929 | SEQ ID NO: 6295 |
| rs1269852 | SEQ ID NO: 1564 | SEQ ID NO: 3930 | SEQ ID NO: 6296 |
| rs241457 | SEQ ID NO: 1565 | SEQ ID NO: 3931 | SEQ ID NO: 6297 |
| rs2077102 | SEQ ID NO: 1566 | SEQ ID NO: 3932 | SEQ ID NO: 6298 |
| rs1736995 | SEQ ID NO: 1567 | SEQ ID NO: 3933 | SEQ ID NO: 6299 |
| rs241413 | SEQ ID NO: 1568 | SEQ ID NO: 3934 | SEQ ID NO: 6300 |
| rs1362074 | SEQ ID NO: 1569 | SEQ ID NO: 3935 | SEQ ID NO: 6301 |
| rs2524222 | SEQ ID NO: 1570 | SEQ ID NO: 3936 | SEQ ID NO: 6302 |
| rs2857768 | SEQ ID NO: 1571 | SEQ ID NO: 3937 | SEQ ID NO: 6303 |
| rs2394390 | SEQ ID NO: 1572 | SEQ ID NO: 3938 | SEQ ID NO: 6304 |
| rs3218819 | SEQ ID NO: 1573 | SEQ ID NO: 3939 | SEQ ID NO: 6305 |
| rs2736176 | SEQ ID NO: 1574 | SEQ ID NO: 3940 | SEQ ID NO: 6306 |
| rs885933 | SEQ ID NO: 1575 | SEQ ID NO: 3941 | SEQ ID NO: 6307 |
| rs2517889 | SEQ ID NO: 1576 | SEQ ID NO: 3942 | SEQ ID NO: 6308 |
| rs2207337 | SEQ ID NO: 1577 | SEQ ID NO: 3943 | SEQ ID NO: 6309 |
| rs4713293 | SEQ ID NO: 1578 | SEQ ID NO: 3944 | SEQ ID NO: 6310 |
| rs2040410 | SEQ ID NO: 1579 | SEQ ID NO: 3945 | SEQ ID NO: 6311 |
| rs1557611 | SEQ ID NO: 1580 | SEQ ID NO: 3946 | SEQ ID NO: 6312 |
| rs3129942 | SEQ ID NO: 1581 | SEQ ID NO: 3947 | SEQ ID NO: 6313 |
| rs3094138 | SEQ ID NO: 1582 | SEQ ID NO: 3948 | SEQ ID NO: 6314 |
| rs3129304 | SEQ ID NO: 1583 | SEQ ID NO: 3949 | SEQ ID NO: 6315 |
| rs2071288 | SEQ ID NO: 1584 | SEQ ID NO: 3950 | SEQ ID NO: 6316 |
| rs6921644 | SEQ ID NO: 1585 | SEQ ID NO: 3951 | SEQ ID NO: 6317 |
| rs206777 | SEQ ID NO: 1586 | SEQ ID NO: 3952 | SEQ ID NO: 6318 |
| rs17719 | SEQ ID NO: 1587 | SEQ ID NO: 3953 | SEQ ID NO: 6319 |
| rs1024470 | SEQ ID NO: 1588 | SEQ ID NO: 3954 | SEQ ID NO: 6320 |
| rs620202 | SEQ ID NO: 1589 | SEQ ID NO: 3955 | SEQ ID NO: 6321 |
| rs409558 | SEQ ID NO: 1590 | SEQ ID NO: 3956 | SEQ ID NO: 6322 |
| rs3117330 | SEQ ID NO: 1591 | SEQ ID NO: 3957 | SEQ ID NO: 6323 |
| rs2071481 | SEQ ID NO: 1592 | SEQ ID NO: 3958 | SEQ ID NO: 6324 |
| rs2071544 | SEQ ID NO: 1593 | SEQ ID NO: 3959 | SEQ ID NO: 6325 |
| rs362512 | SEQ ID NO: 1594 | SEQ ID NO: 3960 | SEQ ID NO: 6326 |
| rs1056032 | SEQ ID NO: 1595 | SEQ ID NO: 3961 | SEQ ID NO: 6327 |
| rs4711185 | SEQ ID NO: 1596 | SEQ ID NO: 3962 | SEQ ID NO: 6328 |
| rs6457204 | SEQ ID NO: 1597 | SEQ ID NO: 3963 | SEQ ID NO: 6329 |
| rs7451190 | SEQ ID NO: 1598 | SEQ ID NO: 3964 | SEQ ID NO: 6330 |
| rs474534 | SEQ ID NO: 1599 | SEQ ID NO: 3965 | SEQ ID NO: 6331 |
| rs1480380 | SEQ ID NO: 1600 | SEQ ID NO: 3966 | SEQ ID NO: 6332 |
| rs6914285 | SEQ ID NO: 1601 | SEQ ID NO: 3967 | SEQ ID NO: 6333 |
| rs3129953 | SEQ ID NO: 1602 | SEQ ID NO: 3968 | SEQ ID NO: 6334 |
| rs6927487 | SEQ ID NO: 1603 | SEQ ID NO: 3969 | SEQ ID NO: 6335 |
| rs3095151 | SEQ ID NO: 1604 | SEQ ID NO: 3970 | SEQ ID NO: 6336 |
| rs1573298 | SEQ ID NO: 1605 | SEQ ID NO: 3971 | SEQ ID NO: 6337 |
| rs3104395 | SEQ ID NO: 1606 | SEQ ID NO: 3972 | SEQ ID NO: 6338 |
| rs2395316 | SEQ ID NO: 1607 | SEQ ID NO: 3973 | SEQ ID NO: 6339 |
| rs1264707 | SEQ ID NO: 1608 | SEQ ID NO: 3974 | SEQ ID NO: 6340 |
| rs3095313 | SEQ ID NO: 1609 | SEQ ID NO: 3975 | SEQ ID NO: 6341 |
| rs2735054 | SEQ ID NO: 1610 | SEQ ID NO: 3976 | SEQ ID NO: 6342 |
| rs886390 | SEQ ID NO: 1611 | SEQ ID NO: 3977 | SEQ ID NO: 6343 |
| rs2523721 | SEQ ID NO: 1612 | SEQ ID NO: 3978 | SEQ ID NO: 6344 |
| rs2239800 | SEQ ID NO: 1613 | SEQ ID NO: 3979 | SEQ ID NO: 6345 |
| rs2747466 | SEQ ID NO: 1614 | SEQ ID NO: 3980 | SEQ ID NO: 6346 |
| rs1029239 | SEQ ID NO: 1615 | SEQ ID NO: 3981 | SEQ ID NO: 6347 |
| rs2523676 | SEQ ID NO: 1616 | SEQ ID NO: 3982 | SEQ ID NO: 6348 |
| rs3757335 | SEQ ID NO: 1617 | SEQ ID NO: 3983 | SEQ ID NO: 6349 |
| rs760070 | SEQ ID NO: 1618 | SEQ ID NO: 3984 | SEQ ID NO: 6350 |
| rs2442719 | SEQ ID NO: 1619 | SEQ ID NO: 3985 | SEQ ID NO: 6351 |
| rs1573297 | SEQ ID NO: 1620 | SEQ ID NO: 3986 | SEQ ID NO: 6352 |
| rs3132569 | SEQ ID NO: 1621 | SEQ ID NO: 3987 | SEQ ID NO: 6353 |
| rs2844523 | SEQ ID NO: 1622 | SEQ ID NO: 3988 | SEQ ID NO: 6354 |
| rs2077573 | SEQ ID NO: 1623 | SEQ ID NO: 3989 | SEQ ID NO: 6355 |
| rs2249168 | SEQ ID NO: 1624 | SEQ ID NO: 3990 | SEQ ID NO: 6356 |
| rs2844780 | SEQ ID NO: 1625 | SEQ ID NO: 3991 | SEQ ID NO: 6357 |
| rs6457655 | SEQ ID NO: 1626 | SEQ ID NO: 3992 | SEQ ID NO: 6358 |
| rs7770024 | SEQ ID NO: 1627 | SEQ ID NO: 3993 | SEQ ID NO: 6359 |
| rs458434 | SEQ ID NO: 1628 | SEQ ID NO: 3994 | SEQ ID NO: 6360 |
| rs204894 | SEQ ID NO: 1629 | SEQ ID NO: 3995 | SEQ ID NO: 6361 |
| rs6905949 | SEQ ID NO: 1630 | SEQ ID NO: 3996 | SEQ ID NO: 6362 |
| rs3135376 | SEQ ID NO: 1631 | SEQ ID NO: 3997 | SEQ ID NO: 6363 |
| rs1018434 | SEQ ID NO: 1632 | SEQ ID NO: 3998 | SEQ ID NO: 6364 |
| rs204879 | SEQ ID NO: 1633 | SEQ ID NO: 3999 | SEQ ID NO: 6365 |
| rs3129943 | SEQ ID NO: 1634 | SEQ ID NO: 4000 | SEQ ID NO: 6366 |
| rs7772569 | SEQ ID NO: 1635 | SEQ ID NO: 4001 | SEQ ID NO: 6367 |
| rs2248902 | SEQ ID NO: 1636 | SEQ ID NO: 4002 | SEQ ID NO: 6368 |
| rs2517449 | SEQ ID NO: 1637 | SEQ ID NO: 4003 | SEQ ID NO: 6369 |
| rs2859448 | SEQ ID NO: 1638 | SEQ ID NO: 4004 | SEQ ID NO: 6370 |
| rs2857694 | SEQ ID NO: 1639 | SEQ ID NO: 4005 | SEQ ID NO: 6371 |
| rs3132671 | SEQ ID NO: 1640 | SEQ ID NO: 4006 | SEQ ID NO: 6372 |
| rs2395301 | SEQ ID NO: 1641 | SEQ ID NO: 4007 | SEQ ID NO: 6373 |
| rs2516455 | SEQ ID NO: 1642 | SEQ ID NO: 4008 | SEQ ID NO: 6374 |
| rs2294472 | SEQ ID NO: 1643 | SEQ ID NO: 4009 | SEQ ID NO: 6375 |
| rs2077580 | SEQ ID NO: 1644 | SEQ ID NO: 4010 | SEQ ID NO: 6376 |
| rs1061783 | SEQ ID NO: 1645 | SEQ ID NO: 4011 | SEQ ID NO: 6377 |
| rs3135024 | SEQ ID NO: 1646 | SEQ ID NO: 4012 | SEQ ID NO: 6378 |
| rs204994 | SEQ ID NO: 1647 | SEQ ID NO: 4013 | SEQ ID NO: 6379 |
| rs1059174 | SEQ ID NO: 1648 | SEQ ID NO: 4014 | SEQ ID NO: 6380 |
| rs1233422 | SEQ ID NO: 1649 | SEQ ID NO: 4015 | SEQ ID NO: 6381 |
| rs7772297 | SEQ ID NO: 1650 | SEQ ID NO: 4016 | SEQ ID NO: 6382 |
| rs3132613 | SEQ ID NO: 1651 | SEQ ID NO: 4017 | SEQ ID NO: 6383 |
| rs2272592 | SEQ ID NO: 1652 | SEQ ID NO: 4018 | SEQ ID NO: 6384 |
| rs2523790 | SEQ ID NO: 1653 | SEQ ID NO: 4019 | SEQ ID NO: 6385 |
| rs2071476 | SEQ ID NO: 1654 | SEQ ID NO: 4020 | SEQ ID NO: 6386 |
| rs2105903 | SEQ ID NO: 1655 | SEQ ID NO: 4021 | SEQ ID NO: 6387 |
| rs7382555 | SEQ ID NO: 1656 | SEQ ID NO: 4022 | SEQ ID NO: 6388 |
| rs3115663 | SEQ ID NO: 1657 | SEQ ID NO: 4023 | SEQ ID NO: 6389 |
| rs492899 | SEQ ID NO: 1658 | SEQ ID NO: 4024 | SEQ ID NO: 6390 |
| rs707939 | SEQ ID NO: 1659 | SEQ ID NO: 4025 | SEQ ID NO: 6391 |
| rs3094614 | SEQ ID NO: 1660 | SEQ ID NO: 4026 | SEQ ID NO: 6392 |
| rs2734990 | SEQ ID NO: 1661 | SEQ ID NO: 4027 | SEQ ID NO: 6393 |
| rs2273612 | SEQ ID NO: 1662 | SEQ ID NO: 4028 | SEQ ID NO: 6394 |
| rs438999 | SEQ ID NO: 1663 | SEQ ID NO: 4029 | SEQ ID NO: 6395 |
| rs206786 | SEQ ID NO: 1664 | SEQ ID NO: 4030 | SEQ ID NO: 6396 |
| rs362536 | SEQ ID NO: 1665 | SEQ ID NO: 4031 | SEQ ID NO: 6397 |
| rs2523395 | SEQ ID NO: 1666 | SEQ ID NO: 4032 | SEQ ID NO: 6398 |
| rs1064190 | SEQ ID NO: 1667 | SEQ ID NO: 4033 | SEQ ID NO: 6399 |
| rs3130267 | SEQ ID NO: 1668 | SEQ ID NO: 4034 | SEQ ID NO: 6400 |
| rs7762933 | SEQ ID NO: 1669 | SEQ ID NO: 4035 | SEQ ID NO: 6401 |
| rs3094211 | SEQ ID NO: 1670 | SEQ ID NO: 4036 | SEQ ID NO: 6402 |
| rs3129932 | SEQ ID NO: 1671 | SEQ ID NO: 4037 | SEQ ID NO: 6403 |
| rs2275855 | SEQ ID NO: 1672 | SEQ ID NO: 4038 | SEQ ID NO: 6404 |
| rs2516399 | SEQ ID NO: 1673 | SEQ ID NO: 4039 | SEQ ID NO: 6405 |
| rs2857210 | SEQ ID NO: 1674 | SEQ ID NO: 4040 | SEQ ID NO: 6406 |
| rs7357044 | SEQ ID NO: 1675 | SEQ ID NO: 4041 | SEQ ID NO: 6407 |
| rs592229 | SEQ ID NO: 1676 | SEQ ID NO: 4042 | SEQ ID NO: 6408 |
| rs2844773 | SEQ ID NO: 1677 | SEQ ID NO: 4043 | SEQ ID NO: 6409 |
| rs2523459 | SEQ ID NO: 1678 | SEQ ID NO: 4044 | SEQ ID NO: 6410 |
| rs2734962 | SEQ ID NO: 1679 | SEQ ID NO: 4045 | SEQ ID NO: 6411 |
| rs2894046 | SEQ ID NO: 1680 | SEQ ID NO: 4046 | SEQ ID NO: 6412 |
| rs15574 | SEQ ID NO: 1681 | SEQ ID NO: 4047 | SEQ ID NO: 6413 |
| rs6919855 | SEQ ID NO: 1682 | SEQ ID NO: 4048 | SEQ ID NO: 6414 |
| rs1362076 | SEQ ID NO: 1683 | SEQ ID NO: 4049 | SEQ ID NO: 6415 |
| rs740884 | SEQ ID NO: 1684 | SEQ ID NO: 4050 | SEQ ID NO: 6416 |
| rs6922512 | SEQ ID NO: 1685 | SEQ ID NO: 4051 | SEQ ID NO: 6417 |
| rs6926737 | SEQ ID NO: 1686 | SEQ ID NO: 4052 | SEQ ID NO: 6418 |
| rs2523747 | SEQ ID NO: 1687 | SEQ ID NO: 4053 | SEQ ID NO: 6419 |
| rs2023470 | SEQ ID NO: 1688 | SEQ ID NO: 4054 | SEQ ID NO: 6420 |
| rs2239839 | SEQ ID NO: 1689 | SEQ ID NO: 4055 | SEQ ID NO: 6421 |
| rs3131050 | SEQ ID NO: 1690 | SEQ ID NO: 4056 | SEQ ID NO: 6422 |
| rs2523984 | SEQ ID NO: 1691 | SEQ ID NO: 4057 | SEQ ID NO: 6423 |
| rs3132965 | SEQ ID NO: 1692 | SEQ ID NO: 4058 | SEQ ID NO: 6424 |
| rs3115537 | SEQ ID NO: 1693 | SEQ ID NO: 4059 | SEQ ID NO: 6425 |
| rs2647044 | SEQ ID NO: 1694 | SEQ ID NO: 4060 | SEQ ID NO: 6426 |
| rs1419640 | SEQ ID NO: 1695 | SEQ ID NO: 4061 | SEQ ID NO: 6427 |
| rs8283 | SEQ ID NO: 1696 | SEQ ID NO: 4062 | SEQ ID NO: 6428 |
| rs2517810 | SEQ ID NO: 1697 | SEQ ID NO: 4063 | SEQ ID NO: 6429 |
| rs2394694 | SEQ ID NO: 1698 | SEQ ID NO: 4064 | SEQ ID NO: 6430 |
| rs2076483 | SEQ ID NO: 1699 | SEQ ID NO: 4065 | SEQ ID NO: 6431 |
| rs411337 | SEQ ID NO: 1700 | SEQ ID NO: 4066 | SEQ ID NO: 6432 |
| rs6934993 | SEQ ID NO: 1701 | SEQ ID NO: 4067 | SEQ ID NO: 6433 |
| rs1245371 | SEQ ID NO: 1702 | SEQ ID NO: 4068 | SEQ ID NO: 6434 |
| rs6902723 | SEQ ID NO: 1703 | SEQ ID NO: 4069 | SEQ ID NO: 6435 |
| rs3134942 | SEQ ID NO: 1704 | SEQ ID NO: 4070 | SEQ ID NO: 6436 |
| rs454212 | SEQ ID NO: 1705 | SEQ ID NO: 4071 | SEQ ID NO: 6437 |
| rs1362126 | SEQ ID NO: 1706 | SEQ ID NO: 4072 | SEQ ID NO: 6438 |
| rs2075701 | SEQ ID NO: 1707 | SEQ ID NO: 4073 | SEQ ID NO: 6439 |
| rs3130502 | SEQ ID NO: 1708 | SEQ ID NO: 4074 | SEQ ID NO: 6440 |
| rs1057373 | SEQ ID NO: 1709 | SEQ ID NO: 4075 | SEQ ID NO: 6441 |
| rs1736936 | SEQ ID NO: 1710 | SEQ ID NO: 4076 | SEQ ID NO: 6442 |
| rs7763159 | SEQ ID NO: 1711 | SEQ ID NO: 4077 | SEQ ID NO: 6443 |
| rs2517755 | SEQ ID NO: 1712 | SEQ ID NO: 4078 | SEQ ID NO: 6444 |
| rs3131000 | SEQ ID NO: 1713 | SEQ ID NO: 4079 | SEQ ID NO: 6445 |
| rs1233384 | SEQ ID NO: 1714 | SEQ ID NO: 4080 | SEQ ID NO: 6446 |
| rs2239804 | SEQ ID NO: 1715 | SEQ ID NO: 4081 | SEQ ID NO: 6447 |
| rs3132668 | SEQ ID NO: 1716 | SEQ ID NO: 4082 | SEQ ID NO: 6448 |
| rs2074464 | SEQ ID NO: 1717 | SEQ ID NO: 4083 | SEQ ID NO: 6449 |
| rs2857107 | SEQ ID NO: 1718 | SEQ ID NO: 4084 | SEQ ID NO: 6450 |
| rs1362063 | SEQ ID NO: 1719 | SEQ ID NO: 4085 | SEQ ID NO: 6451 |
| rs1536215 | SEQ ID NO: 1720 | SEQ ID NO: 4086 | SEQ ID NO: 6452 |
| rs3135395 | SEQ ID NO: 1721 | SEQ ID NO: 4087 | SEQ ID NO: 6453 |
| rs3757328 | SEQ ID NO: 1722 | SEQ ID NO: 4088 | SEQ ID NO: 6454 |
| rs3130982 | SEQ ID NO: 1723 | SEQ ID NO: 4089 | SEQ ID NO: 6455 |
| rs2395269 | SEQ ID NO: 1724 | SEQ ID NO: 4090 | SEQ ID NO: 6456 |
| rs1264423 | SEQ ID NO: 1725 | SEQ ID NO: 4091 | SEQ ID NO: 6457 |
| rs2532929 | SEQ ID NO: 1726 | SEQ ID NO: 4092 | SEQ ID NO: 6458 |
| rs805303 | SEQ ID NO: 1727 | SEQ ID NO: 4093 | SEQ ID NO: 6459 |
| rs2260000 | SEQ ID NO: 1728 | SEQ ID NO: 4094 | SEQ ID NO: 6460 |
| rs86567 | SEQ ID NO: 1729 | SEQ ID NO: 4095 | SEQ ID NO: 6461 |
| rs3117328 | SEQ ID NO: 1730 | SEQ ID NO: 4096 | SEQ ID NO: 6462 |
| rs4711203 | SEQ ID NO: 1731 | SEQ ID NO:.4097 | SEQ ID NO: 6463 |
| rs2763982 | SEQ ID NO: 1732 | SEQ ID NO: 4098 | SEQ ID NO: 6464 |
| rs3130349 | SEQ ID NO: 1733 | SEQ ID NO: 4099 | SEQ ID NO: 6465 |
| rs2021365 | SEQ ID NO: 1734 | SEQ ID NO: 4100 | SEQ ID NO: 6466 |
| rs3117231 | SEQ ID NO: 1735 | SEQ ID NO: 4101 | SEQ ID NO: 6467 |
| rs2021719 | SEQ ID NO: 1736 | SEQ ID NO: 4102 | SEQ ID NO: 6468 |
| rs5009557 | SEQ ID NO: 1737 | SEQ ID NO: 4103 | SEQ ID NO: 6469 |
| rs1269556 | SEQ ID NO: 1738 | SEQ ID NO: 4104 | SEQ ID NO: 6470 |
| rs3131785 | SEQ ID NO: 1739 | SEQ ID NO: 4105 | SEQ ID NO: 6471 |
| rs362521 | SEQ ID NO: 1740 | SEQ ID NO: 4106 | SEQ ID NO: 6472 |
| rs644774 | SEQ ID NO: 1741 | SEQ ID NO: 4107 | SEQ ID NO: 6473 |
| rs558702 | SEQ ID NO: 1742 | SEQ ID NO: 4108 | SEQ ID NO: 6474 |
| rs3132571 | SEQ ID NO: 1743 | SEQ ID NO: 4109 | SEQ ID NO: 6475 |
| rs6932290 | SEQ ID NO: 1744 | SEQ ID NO: 4110 | SEQ ID NO: 6476 |
| rs429608 | SEQ ID NO: 1745 | SEQ ID NO: 4111 | SEQ ID NO: 6477 |
| rs2245738 | SEQ ID NO: 1746 | SEQ ID NO: 4112 | SEQ ID NO: 6478 |
| rs1633034 | SEQ ID NO: 1747 | SEQ ID NO: 4113 | SEQ ID NO: 6479 |
| rs2524179 | SEQ ID NO: 1748 | SEQ ID NO: 4114 | SEQ ID NO: 6480 |
| rs7776164 | SEQ ID NO: 1749 | SEQ ID NO: 4115 | SEQ ID NO: 6481 |
| rs3095226 | SEQ ID NO: 1750 | SEQ ID NO: 4116 | SEQ ID NO: 6482 |
| rs6457044 | SEQ ID NO: 1751 | SEQ ID NO: 4117 | SEQ ID NO: 6483 |
| rs362515 | SEQ ID NO: 1752 | SEQ ID NO: 4118 | SEQ ID NO: 6484 |
| rs3131934 | SEQ ID NO: 1753 | SEQ ID NO: 4119 | SEQ ID NO: 6485 |
| rs750332 | SEQ ID NO: 1754 | SEQ ID NO: 4120 | SEQ ID NO: 6486 |
| rs5009448 | SEQ ID NO: 1755 | SEQ ID NO: 4121 | SEQ ID NO: 6487 |
| rs2508024 | SEQ ID NO: 1756 | SEQ ID NO: 4122 | SEQ ID NO: 6488 |
| rs3130275 | SEQ ID NO: 1757 | SEQ ID NO: 4123 | SEQ ID NO: 6489 |
| rs3131115 | SEQ ID NO: 1758 | SEQ ID NO: 4124 | SEQ ID NO: 6490 |
| rs1131541 | SEQ ID NO: 1759 | SEQ ID NO: 4125 | SEQ ID NO: 6491 |
| rs7452206 | SEQ ID NO: 1760 | SEQ ID NO: 4126 | SEQ ID NO: 6492 |
| rs2074470 | SEQ ID NO: 1761 | SEQ ID NO: 4127 | SEQ ID NO: 6493 |
| rs7751953 | SEQ ID NO: 1762 | SEQ ID NO: 4128 | SEQ ID NO: 6494 |
| rs2073148 | SEQ ID NO: 1763 | SEQ ID NO: 4129 | SEQ ID NO: 6495 |
| rs885910 | SEQ ID NO: 1764 | SEQ ID NO: 4130 | SEQ ID NO: 6496 |
| rs3094179 | SEQ ID NO: 1765 | SEQ ID NO: 4131 | SEQ ID NO: 6497 |
| rs2301277 | SEQ ID NO: 1766 | SEQ ID NO: 4132 | SEQ ID NO: 6498 |
| rs2239885 | SEQ ID NO: 1767 | SEQ ID NO: 4133 | SEQ ID NO: 6499 |
| rs356963 | SEQ ID NO: 1768 | SEQ ID NO: 4134 | SEQ ID NO: 6500 |
| rs3132721 | SEQ ID NO: 1769 | SEQ ID NO: 4135 | SEQ ID NO: 6501 |
| rs928976 | SEQ ID NO: 1770 | SEQ ID NO: 4136 | SEQ ID NO: 6502 |
| rs3131784 | SEQ ID NO: 1771 | SEQ ID NO: 4137 | SEQ ID NO: 6503 |
| rs3097652 | SEQ ID NO: 1772 | SEQ ID NO: 4138 | SEQ ID NO: 6504 |
| rs805304 | SEQ ID NO: 1773 | SEQ ID NO: 4139 | SEQ ID NO: 6505 |
| rs5017401 | SEQ ID NO: 1774 | SEQ ID NO: 4140 | SEQ ID NO: 6506 |
| rs130067 | SEQ ID NO: 1775 | SEQ ID NO: 4141 | SEQ ID NO: 6507 |
| rs2530716 | SEQ ID NO: 1776 | SEQ ID NO: 4142 | SEQ ID NO: 6508 |
| rs635348 | SEQ ID NO: 1777 | SEQ ID NO: 4143 | SEQ ID NO: 6509 |
| rs464865 | SEQ ID NO: 1778 | SEQ ID NO: 4144 | SEQ ID NO: 6510 |
| rs2844688 | SEQ ID NO: 1779 | SEQ ID NO: 4145 | SEQ ID NO: 6511 |
| rs1632938 | SEQ ID NO: 1780 | SEQ ID NO: 4146 | SEQ ID NO: 6512 |
| rs565876 | SEQ ID NO: 1781 | SEQ ID NO: 4147 | SEQ ID NO: 6513 |
| rs6911246 | SEQ ID NO: 1782 | SEQ ID NO: 4148 | SEQ ID NO: 6514 |
| rs3093557 | SEQ ID NO: 1783 | SEQ ID NO: 4149 | SEQ ID NO: 6515 |
| rs2516672 | SEQ ID NO: 1784 | SEQ ID NO: 4150 | SEQ ID NO: 6516 |
| rs3095307 | SEQ ID NO: 1785 | SEQ ID NO: 4151 | SEQ ID NO: 6517 |
| rs3814959 | SEQ ID NO: 1786 | SEQ ID NO: 4152 | SEQ ID NO: 6518 |
| rs1611493 | SEQ ID NO: 1787 | SEQ ID NO: 4153 | SEQ ID NO: 6519 |
| rs1233492 | SEQ ID NO: 1788 | SEQ ID NO: 4154 | SEQ ID NO: 6520 |
| rs6456890 | SEQ ID NO: 1789 | SEQ ID NO: 4155 | SEQ ID NO: 6521 |
| rs2844680 | SEQ ID NO: 1790 | SEQ ID NO: 4156 | SEQ ID NO: 6522 |
| rs769177 | SEQ ID NO: 1791 | SEQ ID NO: 4157 | SEQ ID NO: 6523 |
| rs2844659 | SEQ ID NO: 1792 | SEQ ID NO: 4158 | SEQ ID NO: 6524 |
| rs2516698 | SEQ ID NO: 1793 | SEQ ID NO: 4159 | SEQ ID NO: 6525 |
| rs204890 | SEQ ID NO: 1794 | SEQ ID NO: 4160 | SEQ ID NO: 6526 |
| rs6457699 | SEQ ID NO: 1795 | SEQ ID NO: 4161 | SEQ ID NO: 6527 |
| rs2071787 | SEQ ID NO: 1796 | SEQ ID NO: 4162 | SEQ ID NO: 6528 |
| rs892666 | SEQ ID NO: 1797 | SEQ ID NO: 4163 | SEQ ID NO: 6529 |
| rs2517894 | SEQ ID NO: 1798 | SEQ ID NO: 4164 | SEQ ID NO: 6530 |
| rs1264348 | SEQ ID NO: 1799 | SEQ ID NO: 4165 | SEQ ID NO: 6531 |
| rs2394734 | SEQ ID NO: 1800 | SEQ ID NO: 4166 | SEQ ID NO: 6532 |
| rs3749950 | SEQ ID NO: 1801 | SEQ ID NO: 4167 | SEQ ID NO: 6533 |
| rs1264350 | SEQ ID NO: 1802 | SEQ ID NO: 4168 | SEQ ID NO: 6534 |
| rs2517407 | SEQ ID NO: 1803 | SEQ ID NO: 4169 | SEQ ID NO: 6535 |
| rs3117426 | SEQ ID NO: 1804 | SEQ ID NO: 4170 | SEQ ID NO: 6536 |
| rs3134767 | SEQ ID NO: 1805 | SEQ ID NO: 4171 | SEQ ID NO: 6537 |
| rs2535238 | SEQ ID NO: 1806 | SEQ ID NO: 4172 | SEQ ID NO: 6538 |
| rs805282 | SEQ ID NO: 1807 | SEQ ID NO: 4173 | SEQ ID NO: 6539 |
| rs401618 | SEQ ID NO: 1808 | SEQ ID NO: 4174 | SEQ ID NO: 6540 |
| rs550605 | SEQ ID NO: 1809 | SEQ ID NO: 4175 | SEQ ID NO: 6541 |
| rs2021722 | SEQ ID NO: 1810 | SEQ ID NO: 4176 | SEQ ID NO: 6542 |
| rs885950 | SEQ ID NO: 1811 | SEQ ID NO: 4177 | SEQ ID NO: 6543 |
| rs2516489 | SEQ ID NO: 1812 | SEQ ID NO: 4178 | SEQ ID NO: 6544 |
| rs2239842 | SEQ ID NO: 1813 | SEQ ID NO: 4179 | SEQ ID NO: 6545 |
| rs3117235 | SEQ ID NO: 1814 | SEQ ID NO: 4180 | SEQ ID NO: 6546 |
| rs446145 | SEQ ID NO: 1815 | SEQ ID NO: 4181 | SEQ ID NO: 6547 |
| rs2894260 | SEQ ID NO: 1816 | SEQ ID NO: 4182 | SEQ ID NO: 6548 |
| rs2143468 | SEQ ID NO: 1817 | SEQ ID NO: 4183 | SEQ ID NO: 6549 |
| rs3873260 | SEQ ID NO: 1818 | SEQ ID NO: 4184 | SEQ ID NO: 6550 |
| rs1050391 | SEQ ID NO: 1819 | SEQ ID NO: 4185 | SEQ ID NO: 6551 |
| rs3094001 | SEQ ID NO: 1820 | SEQ ID NO: 4186 | SEQ ID NO: 6552 |
| rs715044 | SEQ ID NO: 1821 | SEQ ID NO: 4187 | SEQ ID NO: 6553 |
| rs1610640 | SEQ ID NO: 1822 | SEQ ID NO: 4188 | SEQ ID NO: 6554 |
| rs887468 | SEQ ID NO: 1823 | SEQ ID NO: 4189 | SEQ ID NO: 6555 |
| rs755714 | SEQ ID NO: 1824 | SEQ ID NO: 4190 | SEQ ID NO: 6556 |
| rs1265777 | SEQ ID NO: 1825 | SEQ ID NO: 4191 | SEQ ID NO: 6557 |
| rs999265 | SEQ ID NO: 1826 | SEQ ID NO: 4192 | SEQ ID NO: 6558 |
| rs2021729 | SEQ ID NO: 1827 | SEQ ID NO: 4193 | SEQ ID NO: 6559 |
| rs7452076 | SEQ ID NO: 1828 | SEQ ID NO: 4194 | SEQ ID NO: 6560 |
| rs743399 | SEQ ID NO: 1829 | SEQ ID NO: 4195 | SEQ ID NO: 6561 |
| rs2256594 | SEQ ID NO: 1830 | SEQ ID NO: 4196 | SEQ ID NO: 6562 |
| rs1046080 | SEQ ID NO: 1831 | SEQ ID NO: 4197 | SEQ ID NO: 6563 |
| rs2523807 | SEQ ID NO: 1832 | SEQ ID NO: 4198 | SEQ ID NO: 6564 |
| rs3094647 | SEQ ID NO: 1833 | SEQ ID NO: 4199 | SEQ ID NO: 6565 |
| rs421446 | SEQ ID NO: 1834 | SEQ ID NO: 4200 | SEQ ID NO: 6566 |
| rs6415110 | SEQ ID NO: 1835 | SEQ ID NO: 4201 | SEQ ID NO: 6567 |
| rs2285805 | SEQ ID NO: 1836 | SEQ ID NO: 4202 | SEQ ID NO: 6568 |
| rs2242955 | SEQ ID NO: 1837 | SEQ ID NO: 4203 | SEQ ID NO: 6569 |
| rs29233 | SEQ ID NO: 1838 | SEQ ID NO: 4204 | SEQ ID NO: 6570 |
| rs4711312 | SEQ ID NO: 1839 | SEQ ID NO: 4205 | SEQ ID NO: 6571 |
| rs1264327 | SEQ ID NO: 1840 | SEQ ID NO: 4206 | SEQ ID NO: 6572 |
| rs2261033 | SEQ ID NO: 1841 | SEQ ID NO: 4207 | SEQ ID NO: 6573 |
| rs805288 | SEQ ID NO: 1842 | SEQ ID NO: 4208 | SEQ ID NO: 6574 |
| rs3106189 | SEQ ID NO: 1843 | SEQ ID NO: 4209 | SEQ ID NO: 6575 |
| rs2157338 | SEQ ID NO: 1844 | SEQ ID NO: 4210 | SEQ ID NO: 6576 |
| rs805299 | SEQ ID NO: 1845 | SEQ ID NO: 4211 | SEQ ID NO: 6577 |
| rs2074505 | SEQ ID NO: 1846 | SEQ ID NO: 4212 | SEQ ID NO: 6578 |
| rs1042338 | SEQ ID NO: 1847 | SEQ ID NO: 4213 | SEQ ID NO: 6579 |
| rs1059510 | SEQ ID NO: 1848 | SEQ ID NO: 4214 | SEQ ID NO: 6580 |
| rs4678 | SEQ ID NO: 1849 | SEQ ID NO: 4215 | SEQ ID NO: 6581 |
| rs396090 | SEQ ID NO: 1850 | SEQ ID NO: 4216 | SEQ ID NO: 6582 |
| rs1233419 | SEQ ID NO: 1851 | SEQ ID NO: 4217 | SEQ ID NO: 6583 |
| rs1265063 | SEQ ID NO: 1852 | SEQ ID NO: 4218 | SEQ ID NO: 6584 |
| rs3117223 | SEQ ID NO: 1853 | SEQ ID NO: 4219 | SEQ ID NO: 6585 |
| rs2269475 | SEQ ID NO: 1854 | SEQ ID NO: 4220 | SEQ ID NO: 6586 |
| rs2235499 | SEQ ID NO: 1855 | SEQ ID NO: 4221 | SEQ ID NO: 6587 |
| rs6457020 | SEQ ID NO: 1856 | SEQ ID NO: 4222 | SEQ ID NO: 6588 |
| rs185819 | SEQ ID NO: 1857 | SEQ ID NO: 4223 | SEQ ID NO: 6589 |
| rs2273611 | SEQ ID NO: 1858 | SEQ ID NO: 4224 | SEQ ID NO: 6590 |
| rs1632879 | SEQ ID NO: 1859 | SEQ ID NO: 4225 | SEQ ID NO: 6591 |
| rs3093551 | SEQ ID NO: 1860 | SEQ ID NO: 4226 | SEQ ID NO: 6592 |
| rs130072 | SEQ ID NO: 1861 | SEQ ID NO: 4227 | SEQ ID NO: 6593 |
| rs2295667 | SEQ ID NO: 1862 | SEQ ID NO: 4228 | SEQ ID NO: 6594 |
| rs2517466 | SEQ ID NO: 1863 | SEQ ID NO: 4229 | SEQ ID NO: 6595 |
| rs2844724 | SEQ ID NO: 1864 | SEQ ID NO: 4230 | SEQ ID NO: 6596 |
| rs7769073 | SEQ ID NO: 1865 | SEQ ID NO: 4231 | SEQ ID NO: 6597 |
| rs3130780 | SEQ ID NO: 1866 | SEQ ID NO: 4232 | SEQ ID NO: 6598 |
| rs4713354 | SEQ ID NO: 1867 | SEQ ID NO: 4233 | SEQ ID NO: 6599 |
| rs2021720 | SEQ ID NO: 1868 | SEQ ID NO: 4234 | SEQ ID NO: 6600 |
| rs6456879 | SEQ ID NO: 1869 | SEQ ID NO: 4235 | SEQ ID NO: 6601 |
| rs6913528 | SEQ ID NO: 1870 | SEQ ID NO: 4236 | SEQ ID NO: 6602 |
| rs6929434 | SEQ ID NO: 1871 | SEQ ID NO: 4237 | SEQ ID NO: 6603 |
| rs2074499 | SEQ ID NO: 1872 | SEQ ID NO: 4238 | SEQ ID NO: 6604 |
| rs518374 | SEQ ID NO: 1873 | SEQ ID NO: 4239 | SEQ ID NO: 6605 |
| rs446735 | SEQ ID NO: 1874 | SEQ ID NO: 4240 | SEQ ID NO: 6606 |
| rs2075799 | SEQ ID NO: 1875 | SEQ ID NO: 4241 | SEQ ID NO: 6607 |
| rs7757012 | SEQ ID NO: 1876 | SEQ ID NO: 4242 | SEQ ID NO: 6608 |
| rs3093984 | SEQ ID NO: 1877 | SEQ ID NO: 4243 | SEQ ID NO: 6609 |
| rs805258 | SEQ ID NO: 1878 | SEQ ID NO: 4244 | SEQ ID NO: 6610 |
| rs2071351 | SEQ ID NO: 1879 | SEQ ID NO: 4245 | SEQ ID NO: 6611 |
| rs6938130 | SEQ ID NO: 1880 | SEQ ID NO: 4246 | SEQ ID NO: 6612 |
| rs3130388 | SEQ ID NO: 1881 | SEQ ID NO: 4247 | SEQ ID NO: 6613 |
| rs1061815 | SEQ ID NO: 1882 | SEQ ID NO: 4248 | SEQ ID NO: 6614 |
| rs241455 | SEQ ID NO: 1883 | SEQ ID NO: 4249 | SEQ ID NO: 6615 |
| rs3891288 | SEQ ID NO: 1884 | SEQ ID NO: 4250 | SEQ ID NO: 6616 |
| rs1655938 | SEQ ID NO: 1885 | SEQ ID NO: 4251 | SEQ ID NO: 6617 |
| rs3131102 | SEQ ID NO: 1886 | SEQ ID NO: 4252 | SEQ ID NO: 6618 |
| rs6457566 | SEQ ID NO: 1887 | SEQ ID NO: 4253 | SEQ ID NO: 6619 |
| rs204887 | SEQ ID NO: 1888 | SEQ ID NO: 4254 | SEQ ID NO: 6620 |
| rs2844725 | SEQ ID NO: 1889 | SEQ ID NO: 4255 | SEQ ID NO: 6621 |
| rs2074491 | SEQ ID NO: 1890 | SEQ ID NO: 4256 | SEQ ID NO: 6622 |
| rs1233425 | SEQ ID NO: 1891 | SEQ ID NO: 4257 | SEQ ID NO: 6623 |
| rs4569 | SEQ ID NO: 1892 | SEQ ID NO: 4258 | SEQ ID NO: 6624 |
| rs2072109 | SEQ ID NO: 1893 | SEQ ID NO: 4259 | SEQ ID NO: 6625 |
| rs3130216 | SEQ ID NO: 1894 | SEQ ID NO: 4260 | SEQ ID NO: 6626 |
| rs3757340 | SEQ ID NO: 1895 | SEQ ID NO: 4261 | SEQ ID NO: 6627 |
| rs3116838 | SEQ ID NO: 1896 | SEQ ID NO: 4262 | SEQ ID NO: 6628 |
| rs7451419 | SEQ ID NO: 1897 | SEQ ID NO: 4263 | SEQ ID NO: 6629 |
| rs1475865 | SEQ ID NO: 1898 | SEQ ID NO: 4264 | SEQ ID NO: 6630 |
| rs1264315 | SEQ ID NO: 1899 | SEQ ID NO: 4265 | SEQ ID NO: 6631 |
| rs2269610 | SEQ ID NO: 1900 | SEQ ID NO: 4266 | SEQ ID NO: 6632 |
| rs3129012 | SEQ ID NO: 1901 | SEQ ID NO: 4267 | SEQ ID NO: 6633 |
| rs3132935 | SEQ ID NO: 1902 | SEQ ID NO: 4268 | SEQ ID NO: 6634 |
| rs2074473 | SEQ ID NO: 1903 | SEQ ID NO: 4269 | SEQ ID NO: 6635 |
| rs3130553 | SEQ ID NO: 1904 | SEQ ID NO: 4270 | SEQ ID NO: 6636 |
| rs2534672 | SEQ ID NO: 1905 | SEQ ID NO: 4271 | SEQ ID NO: 6637 |
| rs1573294 | SEQ ID NO: 1906 | SEQ ID NO: 4272 | SEQ ID NO: 6638 |
| rs7773534 | SEQ ID NO: 1907 | SEQ ID NO: 4273 | SEQ ID NO: 6639 |
| rs1737079 | SEQ ID NO: 1908 | SEQ ID NO: 4274 | SEQ ID NO: 6640 |
| rs805297 | SEQ ID NO: 1909 | SEQ ID NO: 4275 | SEQ ID NO: 6641 |
| rs805298 | SEQ ID NO: 1910 | SEQ ID NO: 4276 | SEQ ID NO: 6642 |
| rs3749951 | SEQ ID NO: 1911 | SEQ ID NO: 4277 | SEQ ID NO: 6643 |
| rs3094208 | SEQ ID NO: 1912 | SEQ ID NO: 4278 | SEQ ID NO: 6644 |
| rs805263 | SEQ ID NO: 1913 | SEQ ID NO: 4279 | SEQ ID NO: 6645 |
| rs3135330 | SEQ ID NO: 1914 | SEQ ID NO: 4280 | SEQ ID NO: 6646 |
| rs734181 | SEQ ID NO: 1915 | SEQ ID NO: 4281 | SEQ ID NO: 6647 |
| rs1050673 | SEQ ID NO: 1916 | SEQ ID NO: 4282 | SEQ ID NO: 6648 |
| rs3129948 | SEQ ID NO: 1917 | SEQ ID NO: 4283 | SEQ ID NO: 6649 |
| rs2517436 | SEQ ID NO: 1918 | SEQ ID NO: 4284 | SEQ ID NO: 6650 |
| rs2242664 | SEQ ID NO: 1919 | SEQ ID NO: 4285 | SEQ ID NO: 6651 |
| rs7761801 | SEQ ID NO: 1920 | SEQ ID NO: 4286 | SEQ ID NO: 6652 |
| rs2077022 | SEQ ID NO: 1921 | SEQ ID NO: 4287 | SEQ ID NO: 6653 |
| rs7743662 | SEQ ID NO: 1922 | SEQ ID NO: 4288 | SEQ ID NO: 6654 |
| rs1264319 | SEQ ID NO: 1923 | SEQ ID NO: 4289 | SEQ ID NO: 6655 |
| rs204990 | SEQ ID NO: 1924 | SEQ ID NO: 4290 | SEQ ID NO: 6656 |
| rs2736158 | SEQ ID NO: 1925 | SEQ ID NO: 4291 | SEQ ID NO: 6657 |
| rs13409 | SEQ ID NO: 1926 | SEQ ID NO: 4292 | SEQ ID NO: 6658 |
| rs3130057 | SEQ ID NO: 1927 | SEQ ID NO: 4293 | SEQ ID NO: 6659 |
| rs2857127 | SEQ ID NO: 1928 | SEQ ID NO: 4294 | SEQ ID NO: 6660 |
| rs7887 | SEQ ID NO: 1929 | SEQ ID NO: 4295 | SEQ ID NO: 6661 |
| rs2535277 | SEQ ID NO: 1930 | SEQ ID NO: 4296 | SEQ ID NO: 6662 |
| rs2395296 | SEQ ID NO: 1931 | SEQ ID NO: 4297 | SEQ ID NO: 6663 |
| rs2294883 | SEQ ID NO: 1932 | SEQ ID NO: 4298 | SEQ ID NO: 6664 |
| rs3129681 | SEQ ID NO: 1933 | SEQ ID NO: 4299 | SEQ ID NO: 6665 |
| rs3130141 | SEQ ID NO: 1934 | SEQ ID NO: 4300 | SEQ ID NO: 6666 |
| rs2285042 | SEQ ID NO: 1935 | SEQ ID NO: 4301 | SEQ ID NO: 6667 |
| rs5027663 | SEQ ID NO: 1936 | SEQ ID NO: 4302 | SEQ ID NO: 6668 |
| rs2294478 | SEQ ID NO: 1937 | SEQ ID NO: 4303 | SEQ ID NO: 6669 |
| rs6457710 | SEQ ID NO: 1938 | SEQ ID NO: 4304 | SEQ ID NO: 6670 |
| rs204900 | SEQ ID NO: 1939 | SEQ ID NO: 4305 | SEQ ID NO: 6671 |
| rs5018660 | SEQ ID NO: 1940 | SEQ ID NO: 4306 | SEQ ID NO: 6672 |
| rs6906587 | SEQ ID NO: 1941 | SEQ ID NO: 4307 | SEQ ID NO: 6673 |
| rs2242653 | SEQ ID NO: 1942 | SEQ ID NO: 4308 | SEQ ID NO: 6674 |
| rs444921 | SEQ ID NO: 1943 | SEQ ID NO: 4309 | SEQ ID NO: 6675 |
| rs2187820 | SEQ ID NO: 1944 | SEQ ID NO: 4310 | SEQ ID NO: 6676 |
| rs2071281 | SEQ ID NO: 1945 | SEQ ID NO: 4311 | SEQ ID NO: 6677 |
| rs3116820 | SEQ ID NO: 1946 | SEQ ID NO: 4312 | SEQ ID NO: 6678 |
| rs241407 | SEQ ID NO: 1947 | SEQ ID NO: 4313 | SEQ ID NO: 6679 |
| rs6457443 | SEQ ID NO: 1948 | SEQ ID NO: 4314 | SEQ ID NO: 6680 |
| rs668558 | SEQ ID NO: 1949 | SEQ ID NO: 4315 | SEQ ID NO: 6681 |
| rs2516675 | SEQ ID NO: 1950 | SEQ ID NO: 4316 | SEQ ID NO: 6682 |
| rs909726 | SEQ ID NO: 1951 | SEQ ID NO: 4317 | SEQ ID NO: 6683 |
| rs4642463 | SEQ ID NO: 1952 | SEQ ID NO: 4318 | SEQ ID NO: 6684 |
| rs3020644 | SEQ ID NO: 1953 | SEQ ID NO: 4319 | SEQ ID NO: 6685 |
| rs2280801 | SEQ ID NO: 1954 | SEQ ID NO: 4320 | SEQ ID NO: 6686 |
| rs1736976 | SEQ ID NO: 1955 | SEQ ID NO: 4321 | SEQ ID NO: 6687 |
| rs1362065 | SEQ ID NO: 1956 | SEQ ID NO: 4322 | SEQ ID NO: 6688 |
| rs3094188 | SEQ ID NO: 1957 | SEQ ID NO: 4323 | SEQ ID NO: 6689 |
| rs7764777 | SEQ ID NO: 1958 | SEQ ID NO: 4324 | SEQ ID NO: 6690 |
| rs4959117 | SEQ ID NO: 1959 | SEQ ID NO: 4325 | SEQ ID NO: 6691 |
| rs2844621 | SEQ ID NO: 1960 | SEQ ID NO: 4326 | SEQ ID NO: 6692 |
| rs3099840 | SEQ ID NO: 1961 | SEQ ID NO: 4327 | SEQ ID NO: 6693 |
| rs2073525 | SEQ ID NO: 1962 | SEQ ID NO: 4328 | SEQ ID NO: 6694 |
| rs3094693 | SEQ ID NO: 1963 | SEQ ID NO: 4329 | SEQ ID NO: 6695 |
| rs7759272 | SEQ ID NO: 1964 | SEQ ID NO: 4330 | SEQ ID NO: 6696 |
| rs6911350 | SEQ ID NO: 1965 | SEQ ID NO: 4331 | SEQ ID NO: 6697 |
| rs2070600 | SEQ ID NO: 1966 | SEQ ID NO: 4332 | SEQ ID NO: 6698 |
| rs2269428 | SEQ ID NO: 1967 | SEQ ID NO: 4333 | SEQ ID NO: 6699 |
| rs2302399 | SEQ ID NO: 1968 | SEQ ID NO: 4334 | SEQ ID NO: 6700 |
| rs1633098 | SEQ ID NO: 1969 | SEQ ID NO: 4335 | SEQ ID NO: 6701 |
| rs555007 | SEQ ID NO: 1970 | SEQ ID NO: 4336 | SEQ ID NO: 6702 |
| rs2508042 | SEQ ID NO: 1971 | SEQ ID NO: 4337 | SEQ ID NO: 6703 |
| rs3130653 | SEQ ID NO: 1972 | SEQ ID NO: 4338 | SEQ ID NO: 6704 |
| rs1705003 | SEQ ID NO: 1973 | SEQ ID NO: 4339 | SEQ ID NO: 6705 |
| rs764554 | SEQ ID NO: 1974 | SEQ ID NO: 4340 | SEQ ID NO: 6706 |
| rs2532942 | SEQ ID NO: 1975 | SEQ ID NO: 4341 | SEQ ID NO: 6707 |
| rs213207 | SEQ ID NO: 1976 | SEQ ID NO: 4342 | SEQ ID NO: 6708 |
| rs2428494 | SEQ ID NO: 1977 | SEQ ID NO: 4343 | SEQ ID NO: 6709 |
| rs1799910 | SEQ ID NO: 1978 | SEQ ID NO: 4344 | SEQ ID NO: 6710 |
| rs2071480 | SEQ ID NO: 1979 | SEQ ID NO: 4345 | SEQ ID NO: 6711 |
| rs1079687 | SEQ ID NO: 1980 | SEQ ID NO: 4346 | SEQ ID NO: 6712 |
| rs970902 | SEQ ID NO: 1981 | SEQ ID NO: 4347 | SEQ ID NO: 6713 |
| rs6900438 | SEQ ID NO: 1982 | SEQ ID NO: 4348 | SEQ ID NO: 6714 |
| rs213213 | SEQ ID NO: 1983 | SEQ ID NO: 4349 | SEQ ID NO: 6715 |
| rs410909 | SEQ ID NO: 1984 | SEQ ID NO: 4350 | SEQ ID NO: 6716 |
| rs1052486 | SEQ ID NO: 1985 | SEQ ID NO: 4351 | SEQ ID NO: 6717 |
| rs1150736 | SEQ ID NO: 1986 | SEQ ID NO: 4352 | SEQ ID NO: 6718 |
| rs130076 | SEQ ID NO: 1987 | SEQ ID NO: 4353 | SEQ ID NO: 6719 |
| rs2395174 | SEQ ID NO: 1988 | SEQ ID NO: 4354 | SEQ ID NO: 6720 |
| rs2252223 | SEQ ID NO: 1989 | SEQ ID NO: 4355 | SEQ ID NO: 6721 |
| rs1264303 | SEQ ID NO: 1990 | SEQ ID NO: 4356 | SEQ ID NO: 6722 |
| rs2240061 | SEQ ID NO: 1991 | SEQ ID NO: 4357 | SEQ ID NO: 6723 |
| rs1345229 | SEQ ID NO: 1992 | SEQ ID NO: 4358 | SEQ ID NO: 6724 |
| rs2395185 | SEQ ID NO: 1993 | SEQ ID NO: 4359 | SEQ ID NO: 6725 |
| rs3130283 | SEQ ID NO: 1994 | SEQ ID NO: 4360 | SEQ ID NO: 6726 |
| rs2257914 | SEQ ID NO: 1995 | SEQ ID NO: 4361 | SEQ ID NO: 6727 |
| rs916920 | SEQ ID NO: 1996 | SEQ ID NO: 4362 | SEQ ID NO: 6728 |
| rs2249059 | SEQ ID NO: 1997 | SEQ ID NO: 4363 | SEQ ID NO: 6729 |
| rs2267640 | SEQ ID NO: 1998 | SEQ ID NO: 4364 | SEQ ID NO: 6730 |
| rs1150765 | SEQ ID NO: 1999 | SEQ ID NO: 4365 | SEQ ID NO: 6731 |
| rs3749967 | SEQ ID NO: 2000 | SEQ ID NO: 4366 | SEQ ID NO: 6732 |
| rs3817963 | SEQ ID NO: 2001 | SEQ ID NO: 4367 | SEQ ID NO: 6733 |
| rs2051549 | SEQ ID NO: 2002 | SEQ ID NO: 4368 | SEQ ID NO: 6734 |
| rs1894408 | SEQ ID NO: 2003 | SEQ ID NO: 4369 | SEQ ID NO: 6735 |
| rs3130315 | SEQ ID NO: 2004 | SEQ ID NO: 4370 | SEQ ID NO: 6736 |
| rs761187 | SEQ ID NO: 2005 | SEQ ID NO: 4371 | SEQ ID NO: 6737 |
| rs3749966 | SEQ ID NO: 2006 | SEQ ID NO: 4372 | SEQ ID NO: 6738 |
| rs2395153 | SEQ ID NO: 2007 | SEQ ID NO: 4373 | SEQ ID NO: 6739 |
| rs1150735 | SEQ ID NO: 2008 | SEQ ID NO: 4374 | SEQ ID NO: 6740 |
| rs7843 | SEQ ID NO: 2009 | SEQ ID NO: 4375 | SEQ ID NO: 6741 |
| rs2074478 | SEQ ID NO: 2010 | SEQ ID NO: 4376 | SEQ ID NO: 6742 |
| rs204993 | SEQ ID NO: 2011 | SEQ ID NO: 4377 | SEQ ID NO: 6743 |
| rs2301271 | SEQ ID NO: 2012 | SEQ ID NO: 4378 | SEQ ID NO: 6744 |
| rs2284168 | SEQ ID NO: 2013 | SEQ ID NO: 4379 | SEQ ID NO: 6745 |
| rs11244 | SEQ ID NO: 2014 | SEQ ID NO: 4380 | SEQ ID NO: 6746 |
| rs1264583 | SEQ ID NO: 2015 | SEQ ID NO: 4381 | SEQ ID NO: 6747 |
| rs2074474 | SEQ ID NO: 2016 | SEQ ID NO: 4382 | SEQ ID NO: 6748 |
| rs2213571 | SEQ ID NO: 2017 | SEQ ID NO: 4383 | SEQ ID NO: 6749 |
| rs204991 | SEQ ID NO: 2018 | SEQ ID NO: 4384 | SEQ ID NO: 6750 |
| rs3129881 | SEQ ID NO: 2019 | SEQ ID NO: 4385 | SEQ ID NO: 6751 |
| rs1049623 | SEQ ID NO: 2020 | SEQ ID NO: 4386 | SEQ ID NO: 6752 |
| rs974962 | SEQ ID NO: 2021 | SEQ ID NO: 4387 | SEQ ID NO: 6753 |
| rs8512 | SEQ ID NO: 2022 | SEQ ID NO: 4388 | SEQ ID NO: 6754 |
| rs2071287 | SEQ ID NO: 2023 | SEQ ID NO: 4389 | SEQ ID NO: 6755 |
| rs1058318 | SEQ ID NO: 2024 | SEQ ID NO: 4390 | SEQ ID NO: 6756 |
| rs2269702 | SEQ ID NO: 2025 | SEQ ID NO: 4391 | SEQ ID NO: 6757 |
| rs2286404 | SEQ ID NO: 2026 | SEQ ID NO: 4392 | SEQ ID NO: 6758 |
| rs2269707 | SEQ ID NO: 2027 | SEQ ID NO: 4393 | SEQ ID NO: 6759 |
| rs2269424 | SEQ ID NO: 2028 | SEQ ID NO: 4394 | SEQ ID NO: 6760 |
| rs2040409 | SEQ ID NO: 2029 | SEQ ID NO: 4395 | SEQ ID NO: 6761 |
| rs241424 | SEQ ID NO: 2030 | SEQ ID NO: 4396 | SEQ ID NO: 6762 |
| rs2854275 | SEQ ID NO: 2031 | SEQ ID NO: 4397 | SEQ ID NO: 6763 |
| rs3880457 | SEQ ID NO: 2032 | SEQ ID NO: 4398 | SEQ ID NO: 6764 |
| rs4711206 | SEQ ID NO: 2033 | SEQ ID NO: 4399 | SEQ ID NO: 6765 |
| rs1233495 | SEQ ID NO: 2034 | SEQ ID NO: 4400 | SEQ ID NO: 6766 |
| rs3130055 | SEQ ID NO: 2035 | SEQ ID NO: 4401 | SEQ ID NO: 6767 |
| rs2071593 | SEQ ID NO: 2036 | SEQ ID NO: 4402 | SEQ ID NO: 6768 |
| rs7758397 | SEQ ID NO: 2037 | SEQ ID NO: 4403 | SEQ ID NO: 6769 |
| rs3130453 | SEQ ID NO: 2038 | SEQ ID NO: 4404 | SEQ ID NO: 6770 |
| rs2242657 | SEQ ID NO: 2039 | SEQ ID NO: 4405 | SEQ ID NO: 6771 |
| rs3130605 | SEQ ID NO: 2040 | SEQ ID NO: 4406 | SEQ ID NO: 6772 |
| rs3093559 | SEQ ID NO: 2041 | SEQ ID NO: 4407 | SEQ ID NO: 6773 |
| rs2235498 | SEQ ID NO: 2042 | SEQ ID NO: 4408 | SEQ ID NO: 6774 |
| rs3135034 | SEQ ID NO: 2043 | SEQ ID NO: 4409 | SEQ ID NO: 6775 |
| rs3129952 | SEQ ID NO: 2044 | SEQ ID NO: 4410 | SEQ ID NO: 6776 |
| rs6457602 | SEQ ID NO: 2045 | SEQ ID NO: 4411 | SEQ ID NO: 6777 |
| rs2523451 | SEQ ID NO: 2046 | SEQ ID NO: 4412 | SEQ ID NO: 6778 |
| rs497239 | SEQ ID NO: 2047 | SEQ ID NO: 4413 | SEQ ID NO: 6779 |
| rs4959050 | SEQ ID NO: 2048 | SEQ ID NO: 4414 | SEQ ID NO: 6780 |
| rs714289 | SEQ ID NO: 2049 | SEQ ID NO: 4415 | SEQ ID NO: 6781 |
| rs447250 | SEQ ID NO: 2050 | SEQ ID NO: 4416 | SEQ ID NO: 6782 |
| rs2844775 | SEQ ID NO: 2051 | SEQ ID NO: 4417 | SEQ ID NO: 6783 |
| rs3135002 | SEQ ID NO: 2052 | SEQ ID NO: 4418 | SEQ ID NO: 6784 |
| rs3077 | SEQ ID NO: 2053 | SEQ ID NO: 4419 | SEQ ID NO: 6785 |
| rs3094205 | SEQ ID NO: 2054 | SEQ ID NO: 4420 | SEQ ID NO: 6786 |
| rs6927088 | SEQ ID NO: 2055 | SEQ ID NO: 4421 | SEQ ID NO: 6787 |
| rs2857174 | SEQ ID NO: 2056 | SEQ ID NO: 4422 | SEQ ID NO: 6788 |
| rs181997 | SEQ ID NO: 2057 | SEQ ID NO: 4423 | SEQ ID NO: 6789 |
| rs261950 | SEQ ID NO: 2058 | SEQ ID NO: 4424 | SEQ ID NO: 6790 |
| rs3117329 | SEQ ID NO: 2059 | SEQ ID NO: 4425 | SEQ ID NO: 6791 |
| rs3128931 | SEQ ID NO: 2060 | SEQ ID NO: 4426 | SEQ ID NO: 6792 |
| rs6904456 | SEQ ID NO: 2061 | SEQ ID NO: 4427 | SEQ ID NO: 6793 |
| rs4713216 | SEQ ID NO: 2062 | SEQ ID NO: 4428 | SEQ ID NO: 6794 |
| rs3097671 | SEQ ID NO: 2063 | SEQ ID NO: 4429 | SEQ ID NO: 6795 |
| rs3135368 | SEQ ID NO: 2064 | SEQ ID NO: 4430 | SEQ ID NO: 6796 |
| rs1264323 | SEQ ID NO: 2065 | SEQ ID NO: 4431 | SEQ ID NO: 6797 |
| rs3094073 | SEQ ID NO: 2066 | SEQ ID NO: 4432 | SEQ ID NO: 6798 |
| rs2523995 | SEQ ID NO: 2067 | SEQ ID NO: 4433 | SEQ ID NO: 6799 |
| rs3131635 | SEQ ID NO: 2068 | SEQ ID NO: 4434 | SEQ ID NO: 6800 |
| rs1610724 | SEQ ID NO: 2069 | SEQ ID NO: 4435 | SEQ ID NO: 6801 |
| rs4713337 | SEQ ID NO: 2070 | SEQ ID NO: 4436 | SEQ ID NO: 6802 |
| rs2855442 | SEQ ID NO: 2071 | SEQ ID NO: 4437 | SEQ ID NO: 6803 |
| rs885915 | SEQ ID NO: 2072 | SEQ ID NO: 4438 | SEQ ID NO: 6804 |
| rs241440 | SEQ ID NO: 2073 | SEQ ID NO: 4439 | SEQ ID NO: 6805 |
| rs879882 | SEQ ID NO: 2074 | SEQ ID NO: 4440 | SEQ ID NO: 6806 |
| rs6937061 | SEQ ID NO: 2075 | SEQ ID NO: 4441 | SEQ ID NO: 6807 |
| rs2023372 | SEQ ID NO: 2076 | SEQ ID NO: 4442 | SEQ ID NO: 6808 |
| rs1610601 | SEQ ID NO: 2077 | SEQ ID NO: 4443 | SEQ ID NO: 6809 |
| rs29228 | SEQ ID NO: 2078 | SEQ ID NO: 4444 | SEQ ID NO: 6810 |
| rs7454372 | SEQ ID NO: 2079 | SEQ ID NO: 4445 | SEQ ID NO: 6811 |
| rs707937 | SEQ ID NO: 2080 | SEQ ID NO: 4446 | SEQ ID NO: 6812 |
| rs7341251 | SEQ ID NO: 2081 | SEQ ID NO: 4447 | SEQ ID NO: 6813 |
| rs1800750 | SEQ ID NO: 2082 | SEQ ID NO: 4448 | SEQ ID NO: 6814 |
| rs2394518 | SEQ ID NO: 2083 | SEQ ID NO: 4449 | SEQ ID NO: 6815 |
| rs2301225 | SEQ ID NO: 2084 | SEQ ID NO: 4450 | SEQ ID NO: 6816 |
| rs1264459 | SEQ ID NO: 2085 | SEQ ID NO: 4451 | SEQ ID NO: 6817 |
| rs7773955 | SEQ ID NO: 2086 | SEQ ID NO: 4452 | SEQ ID NO: 6818 |
| rs15912 | SEQ ID NO: 2087 | SEQ ID NO: 4453 | SEQ ID NO: 6819 |
| rs1419675 | SEQ ID NO: 2088 | SEQ ID NO: 4454 | SEQ ID NO: 6820 |
| rs7450074 | SEQ ID NO: 2089 | SEQ ID NO: 4455 | SEQ ID NO: 6821 |
| rs437179 | SEQ ID NO: 2090 | SEQ ID NO: 4456 | SEQ ID NO: 6822 |
| rs3132486 | SEQ ID NO: 2091 | SEQ ID NO: 4457 | SEQ ID NO: 6823 |
| rs2071286 | SEQ ID NO: 2092 | SEQ ID NO: 4458 | SEQ ID NO: 6824 |
| rs2395029 | SEQ ID NO: 2093 | SEQ ID NO: 4459 | SEQ ID NO: 6825 |
| rs7765791 | SEQ ID NO: 2094 | SEQ ID NO: 4460 | SEQ ID NO: 6826 |
| rs3094576 | SEQ ID NO: 2095 | SEQ ID NO: 4461 | SEQ ID NO: 6827 |
| rs3819269 | SEQ ID NO: 2096 | SEQ ID NO: 4462 | SEQ ID NO: 6828 |
| rs2074471 | SEQ ID NO: 2097 | SEQ ID NO: 4463 | SEQ ID NO: 6829 |
| rs6929716 | SEQ ID NO: 2098 | SEQ ID NO: 4464 | SEQ ID NO: 6830 |
| rs2523608 | SEQ ID NO: 2099 | SEQ ID NO: 4465 | SEQ ID NO: 6831 |
| rs1264540 | SEQ ID NO: 2100 | SEQ ID NO: 4466 | SEQ ID NO: 6832 |
| rs3116996 | SEQ ID NO: 2101 | SEQ ID NO: 4467 | SEQ ID NO: 6833 |
| rs3130933 | SEQ ID NO: 2102 | SEQ ID NO: 4468 | SEQ ID NO: 6834 |
| rs6940867 | SEQ ID NO: 2103 | SEQ ID NO: 4469 | SEQ ID NO: 6835 |
| rs2535250 | SEQ ID NO: 2104 | SEQ ID NO: 4470 | SEQ ID NO: 6836 |
| rs6903608 | SEQ ID NO: 2105 | SEQ ID NO: 4471 | SEQ ID NO: 6837 |
| rs3117435 | SEQ ID NO: 2106 | SEQ ID NO: 4472 | SEQ ID NO: 6838 |
| rs1264425 | SEQ ID NO: 2107 | SEQ ID NO: 4473 | SEQ ID NO: 6839 |
| rs3873342 | SEQ ID NO: 2108 | SEQ ID NO: 4474 | SEQ ID NO: 6840 |
| rs1265059 | SEQ ID NO: 2109 | SEQ ID NO: 4475 | SEQ ID NO: 6841 |
| rs6911634 | SEQ ID NO: 2110 | SEQ ID NO: 4476 | SEQ ID NO: 6842 |
| rs464921 | SEQ ID NO: 2111 | SEQ ID NO: 4477 | SEQ ID NO: 6843 |
| rs4713221 | SEQ ID NO: 2112 | SEQ ID NO: 4478 | SEQ ID NO: 6844 |
| rs362544 | SEQ ID NO: 2113 | SEQ ID NO: 4479 | SEQ ID NO: 6845 |
| rs3130977 | SEQ ID NO: 2114 | SEQ ID NO: 4480 | SEQ ID NO: 6846 |
| rs2395352 | SEQ ID NO: 2115 | SEQ ID NO: 4481 | SEQ ID NO: 6847 |
| rs984802 | SEQ ID NO: 2116 | SEQ ID NO: 4482 | SEQ ID NO: 6848 |
| rs1049633 | SEQ ID NO: 2117 | SEQ ID NO: 4483 | SEQ ID NO: 6849 |
| rs6923005 | SEQ ID NO: 2118 | SEQ ID NO: 4484 | SEQ ID NO: 6850 |
| rs2001181 | SEQ ID NO: 2119 | SEQ ID NO: 4485 | SEQ ID NO: 6851 |
| rs2071541 | SEQ ID NO: 2120 | SEQ ID NO: 4486 | SEQ ID NO: 6852 |
| rs3807039 | SEQ ID NO: 2121 | SEQ ID NO: 4487 | SEQ ID NO: 6853 |
| rs6918223 | SEQ ID NO: 2122 | SEQ ID NO: 4488 | SEQ ID NO: 6854 |
| rs3130501 | SEQ ID NO: 2123 | SEQ ID NO: 4489 | SEQ ID NO: 6855 |
| rs3869092 | SEQ ID NO: 2124 | SEQ ID NO: 4490 | SEQ ID NO: 6856 |
| rs1736920 | SEQ ID NO: 2125 | SEQ ID NO: 4491 | SEQ ID NO: 6857 |
| rs3823418 | SEQ ID NO: 2126 | SEQ ID NO: 4492 | SEQ ID NO: 6858 |
| rs2844802 | SEQ ID NO: 2127 | SEQ ID NO: 4493 | SEQ ID NO: 6859 |
| rs2394412 | SEQ ID NO: 2128 | SEQ ID NO: 4494 | SEQ ID NO: 6860 |
| rs439844 | SEQ ID NO: 2129 | SEQ ID NO: 4495 | SEQ ID NO: 6861 |
| rs3763309 | SEQ ID NO: 2130 | SEQ ID NO: 4496 | SEQ ID NO: 6862 |
| rs7383312 | SEQ ID NO: 2131 | SEQ ID NO: 4497 | SEQ ID NO: 6863 |
| rs1633021 | SEQ ID NO: 2132 | SEQ ID NO: 4498 | SEQ ID NO: 6864 |
| rs1367727 | SEQ ID NO: 2133 | SEQ ID NO: 4499 | SEQ ID NO: 6865 |
| rs2269423 | SEQ ID NO: 2134 | SEQ ID NO: 4500 | SEQ ID NO: 6866 |
| rs29269 | SEQ ID NO: 2135 | SEQ ID NO: 4501 | SEQ ID NO: 6867 |
| rs2894054 | SEQ ID NO: 2136 | SEQ ID NO: 4502 | SEQ ID NO: 6868 |
| rs2534674 | SEQ ID NO: 2137 | SEQ ID NO: 4503 | SEQ ID NO: 6869 |
| rs6915177 | SEQ ID NO: 2138 | SEQ ID NO: 4504 | SEQ ID NO: 6870 |
| rs4713559 | SEQ ID NO: 2139 | SEQ ID NO: 4505 | SEQ ID NO: 6871 |
| rs7382836 | SEQ ID NO: 2140 | SEQ ID NO: 4506 | SEQ ID NO: 6872 |
| rs4071986 | SEQ ID NO: 2141 | SEQ ID NO: 4507 | SEQ ID NO: 6873 |
| rs735883 | SEQ ID NO: 2142 | SEQ ID NO: 4508 | SEQ ID NO: 6874 |
| rs3793127 | SEQ ID NO: 2143 | SEQ ID NO: 4509 | SEQ ID NO: 6875 |
| rs2301269 | SEQ ID NO: 2144 | SEQ ID NO: 4510 | SEQ ID NO: 6876 |
| rs2844685 | SEQ ID NO: 2145 | SEQ ID NO: 4511 | SEQ ID NO: 6877 |
| rs6908943 | SEQ ID NO: 2146 | SEQ ID NO: 4512 | SEQ ID NO: 6878 |
| rs7383578 | SEQ ID NO: 2147 | SEQ ID NO: 4513 | SEQ ID NO: 6879 |
| rs1633088 | SEQ ID NO: 2148 | SEQ ID NO: 4514 | SEQ ID NO: 6880 |
| rs3871247 | SEQ ID NO: 2149 | SEQ ID NO: 4515 | SEQ ID NO: 6881 |
| rs461338 | SEQ ID NO: 2150 | SEQ ID NO: 4516 | SEQ ID NO: 6882 |
| rs3807031 | SEQ ID NO: 2151 | SEQ ID NO: 4517 | SEQ ID NO: 6883 |
| rs6911709 | SEQ ID NO: 2152 | SEQ ID NO: 4518 | SEQ ID NO: 6884 |
| rs2524005 | SEQ ID NO: 2153 | SEQ ID NO: 4519 | SEQ ID NO: 6885 |
| rs1736991 | SEQ ID NO: 2154 | SEQ ID NO: 4520 | SEQ ID NO: 6886 |
| rs4713422 | SEQ ID NO: 2155 | SEQ ID NO: 4521 | SEQ ID NO: 6887 |
| rs6921921 | SEQ ID NO: 2156 | SEQ ID NO: 4522 | SEQ ID NO: 6888 |
| rs7453137 | SEQ ID NO: 2157 | SEQ ID NO: 4523 | SEQ ID NO: 6889 |
| rs1801823 | SEQ ID NO: 2158 | SEQ ID NO: 4524 | SEQ ID NO: 6890 |
| rs498240 | SEQ ID NO: 2159 | SEQ ID NO: 4525 | SEQ ID NO: 6891 |
| rs6906730 | SEQ ID NO: 2160 | SEQ ID NO: 4526 | SEQ ID NO: 6892 |
| rs2057726 | SEQ ID NO: 2161 | SEQ ID NO: 4527 | SEQ ID NO: 6893 |
| rs2523989 | SEQ ID NO: 2162 | SEQ ID NO: 4528 | SEQ ID NO: 6894 |
| rs2071788 | SEQ ID NO: 2163 | SEQ ID NO: 4529 | SEQ ID NO: 6895 |
| rs4713214 | SEQ ID NO: 2164 | SEQ ID NO: 4530 | SEQ ID NO: 6896 |
| rs29273 | SEQ ID NO: 2165 | SEQ ID NO: 4531 | SEQ ID NO: 6897 |
| rs2517912 | SEQ ID NO: 2166 | SEQ ID NO: 4532 | SEQ ID NO: 6898 |
| rs1265156 | SEQ ID NO: 2167 | SEQ ID NO: 4533 | SEQ ID NO: 6899 |
| rs4386816 | SEQ ID NO: 2168 | SEQ ID NO: 4534 | SEQ ID NO: 6900 |
| rs2075702 | SEQ ID NO: 2169 | SEQ ID NO: 4535 | SEQ ID NO: 6901 |
| rs1264616 | SEQ ID NO: 2170 | SEQ ID NO: 4536 | SEQ ID NO: 6902 |
| rs1419633 | SEQ ID NO: 2171 | SEQ ID NO: 4537 | SEQ ID NO: 6903 |
| rs389883 | SEQ ID NO: 2172 | SEQ ID NO: 4538 | SEQ ID NO: 6904 |
| rs2523921 | SEQ ID NO: 2173 | SEQ ID NO: 4539 | SEQ ID NO: 6905 |
| rs209474 | SEQ ID NO: 2174 | SEQ ID NO: 4540 | SEQ ID NO: 6906 |
| rs2532921 | SEQ ID NO: 2175 | SEQ ID NO: 4541 | SEQ ID NO: 6907 |
| rs2207338 | SEQ ID NO: 2176 | SEQ ID NO: 4542 | SEQ ID NO: 6908 |
| rs2844829 | SEQ ID NO: 2177 | SEQ ID NO: 4543 | SEQ ID NO: 6909 |
| rs1035798 | SEQ ID NO: 2178 | SEQ ID NO: 4544 | SEQ ID NO: 6910 |
| rs2857597 | SEQ ID NO: 2179 | SEQ ID NO: 4545 | SEQ ID NO: 6911 |
| rs2747421 | SEQ ID NO: 2180 | SEQ ID NO: 4546 | SEQ ID NO: 6912 |
| rs2246618 | SEQ ID NO: 2181 | SEQ ID NO: 4547 | SEQ ID NO: 6913 |
| rs2855812 | SEQ ID NO: 2182 | SEQ ID NO: 4548 | SEQ ID NO: 6914 |
| rs6457259 | SEQ ID NO: 2183 | SEQ ID NO: 4549 | SEQ ID NO: 6915 |
| rs2071799 | SEQ ID NO: 2184 | SEQ ID NO: 4550 | SEQ ID NO: 6916 |
| rs7754054 | SEQ ID NO: 2185 | SEQ ID NO: 4551 | SEQ ID NO: 6917 |
| rs1049526 | SEQ ID NO: 2186 | SEQ ID NO: 4552 | SEQ ID NO: 6918 |
| rs2284191 | SEQ ID NO: 2187 | SEQ ID NO: 4553 | SEQ ID NO: 6919 |
| rs1655944 | SEQ ID NO: 2188 | SEQ ID NO: 4554 | SEQ ID NO: 6920 |
| rs7451258 | SEQ ID NO: 2189 | SEQ ID NO: 4555 | SEQ ID NO: 6921 |
| rs2844665 | SEQ ID NO: 2190 | SEQ ID NO: 4556 | SEQ ID NO: 6922 |
| rs3763364 | SEQ ID NO: 2191 | SEQ ID NO: 4557 | SEQ ID NO: 6923 |
| rs3128982 | SEQ ID NO: 2192 | SEQ ID NO: 4558 | SEQ ID NO: 6924 |
| rs6457358 | SEQ ID NO: 2193 | SEQ ID NO: 4559 | SEQ ID NO: 6925 |
| rs7758512 | SEQ ID NO: 2194 | SEQ ID NO: 4560 | SEQ ID NO: 6926 |
| rs3115673 | SEQ ID NO: 2195 | SEQ ID NO: 4561 | SEQ ID NO: 6927 |
| rs7029 | SEQ ID NO: 2196 | SEQ ID NO: 4562 | SEQ ID NO: 6928 |
| rs1041885 | SEQ ID NO: 2197 | SEQ ID NO: 4563 | SEQ ID NO: 6929 |
| rs259939 | SEQ ID NO: 2198 | SEQ ID NO: 4564 | SEQ ID NO: 6930 |
| rs3093993 | SEQ ID NO: 2199 | SEQ ID NO: 4565 | SEQ ID NO: 6931 |
| rs6457595 | SEQ ID NO: 2200 | SEQ ID NO: 4566 | SEQ ID NO: 6932 |
| rs3128844 | SEQ ID NO: 2201 | SEQ ID NO: 4567 | SEQ ID NO: 6933 |
| rs3094212 | SEQ ID NO: 2202 | SEQ ID NO: 4568 | SEQ ID NO: 6934 |
| rs1264695 | SEQ ID NO: 2203 | SEQ ID NO: 4569 | SEQ ID NO: 6935 |
| rs2516393 | SEQ ID NO: 2204 | SEQ ID NO: 4570 | SEQ ID NO: 6936 |
| rs209146 | SEQ ID NO: 2205 | SEQ ID NO: 4571 | SEQ ID NO: 6937 |
| rs4713243 | SEQ ID NO: 2206 | SEQ ID NO: 4572 | SEQ ID NO: 6938 |
| rs532385 | SEQ ID NO: 2207 | SEQ ID NO: 4573 | SEQ ID NO: 6939 |
| rs1610628 | SEQ ID NO: 2208 | SEQ ID NO: 4574 | SEQ ID NO: 6940 |
| rs8111 | SEQ ID NO: 2209 | SEQ ID NO: 4575 | SEQ ID NO: 6941 |
| rs2242660 | SEQ ID NO: 2210 | SEQ ID NO: 4576 | SEQ ID NO: 6942 |
| rs3115592 | SEQ ID NO: 2211 | SEQ ID NO: 4577 | SEQ ID NO: 6943 |
| rs3135029 | SEQ ID NO: 2212 | SEQ ID NO: 4578 | SEQ ID NO: 6944 |
| rs3869109 | SEQ ID NO: 2213 | SEQ ID NO: 4579 | SEQ ID NO: 6945 |
| rs2066951 | SEQ ID NO: 2214 | SEQ ID NO: 4580 | SEQ ID NO: 6946 |
| rs2282851 | SEQ ID NO: 2215 | SEQ ID NO: 4581 | SEQ ID NO: 6947 |
| rs2517713 | SEQ ID NO: 2216 | SEQ ID NO: 4582 | SEQ ID NO: 6948 |
| rs7770505 | SEQ ID NO: 2217 | SEQ ID NO: 4583 | SEQ ID NO: 6949 |
| rs3117294 | SEQ ID NO: 2218 | SEQ ID NO: 4584 | SEQ ID NO: 6950 |
| rs2857218 | SEQ ID NO: 2219 | SEQ ID NO: 4585 | SEQ ID NO: 6951 |
| rs2242656 | SEQ ID NO: 2220 | SEQ ID NO: 4586 | SEQ ID NO: 6952 |
| rs2275854 | SEQ ID NO: 2221 | SEQ ID NO: 4587 | SEQ ID NO: 6953 |
| rs3130050 | SEQ ID NO: 2222 | SEQ ID NO: 4588 | SEQ ID NO: 6954 |
| rs7745413 | SEQ ID NO: 2223 | SEQ ID NO: 4589 | SEQ ID NO: 6955 |
| rs2894066 | SEQ ID NO: 2224 | SEQ ID NO: 4590 | SEQ ID NO: 6956 |
| rs3213469 | SEQ ID NO: 2225 | SEQ ID NO: 4591 | SEQ ID NO: 6957 |
| rs406936 | SEQ ID NO: 2226 | SEQ ID NO: 4592 | SEQ ID NO: 6958 |
| rs3916765 | SEQ ID NO: 2227 | SEQ ID NO: 4593 | SEQ ID NO: 6959 |
| rs3873257 | SEQ ID NO: 2228 | SEQ ID NO: 4594 | SEQ ID NO: 6960 |
| rs453658 | SEQ ID NO: 2229 | SEQ ID NO: 4595 | SEQ ID NO: 6961 |
| rs660594 | SEQ ID NO: 2230 | SEQ ID NO: 4596 | SEQ ID NO: 6962 |
| rs1008403 | SEQ ID NO: 2231 | SEQ ID NO: 4597 | SEQ ID NO: 6963 |
| rs763009 | SEQ ID NO: 2232 | SEQ ID NO: 4598 | SEQ ID NO: 6964 |
| rs3130649 | SEQ ID NO: 2233 | SEQ ID NO: 4599 | SEQ ID NO: 6965 |
| rs7752270 | SEQ ID NO: 2234 | SEQ ID NO: 4600 | SEQ ID NO: 6966 |
| rs659445 | SEQ ID NO: 2235 | SEQ ID NO: 4601 | SEQ ID NO: 6967 |
| rs7753474 | SEQ ID NO: 2236 | SEQ ID NO: 4602 | SEQ ID NO: 6968 |
| rs3130762 | SEQ ID NO: 2237 | SEQ ID NO: 4603 | SEQ ID NO: 6969 |
| rs3094127 | SEQ ID NO: 2238 | SEQ ID NO: 4604 | SEQ ID NO: 6970 |
| rs7754598 | SEQ ID NO: 2239 | SEQ ID NO: 4605 | SEQ ID NO: 6971 |
| rs7774255 | SEQ ID NO: 2240 | SEQ ID NO: 4606 | SEQ ID NO: 6972 |
| rs465506 | SEQ ID NO: 2241 | SEQ ID NO: 4607 | SEQ ID NO: 6973 |
| rs2853961 | SEQ ID NO: 2242 | SEQ ID NO: 4608 | SEQ ID NO: 6974 |
| rs3815101 | SEQ ID NO: 2243 | SEQ ID NO: 4609 | SEQ ID NO: 6975 |
| rs2517892 | SEQ ID NO: 2244 | SEQ ID NO: 4610 | SEQ ID NO: 6976 |
| rs2187689 | SEQ ID NO: 2245 | SEQ ID NO: 4611 | SEQ ID NO: 6977 |
| rs6901092 | SEQ ID NO: 2246 | SEQ ID NO: 4612 | SEQ ID NO: 6978 |
| rs2857605 | SEQ ID NO: 2247 | SEQ ID NO: 4613 | SEQ ID NO: 6979 |
| rs2516676 | SEQ ID NO: 2248 | SEQ ID NO: 4614 | SEQ ID NO: 6980 |
| rs6922756 | SEQ ID NO: 2249 | SEQ ID NO: 4615 | SEQ ID NO: 6981 |
| rs2074475 | SEQ ID NO: 2250 | SEQ ID NO: 4616 | SEQ ID NO: 6982 |
| rs1264432 | SEQ ID NO: 2251 | SEQ ID NO: 4617 | SEQ ID NO: 6983 |
| rs2267633 | SEQ ID NO: 2252 | SEQ ID NO: 4618 | SEQ ID NO: 6984 |
| rs2517819 | SEQ ID NO: 2253 | SEQ ID NO: 4619 | SEQ ID NO: 6985 |
| rs3130637 | SEQ ID NO: 2254 | SEQ ID NO: 4620 | SEQ ID NO: 6986 |
| rs3116837 | SEQ ID NO: 2255 | SEQ ID NO: 4621 | SEQ ID NO: 6987 |
| rs3793125 | SEQ ID NO: 2256 | SEQ ID NO: 4622 | SEQ ID NO: 6988 |
| rs757257 | SEQ ID NO: 2257 | SEQ ID NO: 4623 | SEQ ID NO: 6989 |
| rs3117038 | SEQ ID NO: 2258 | SEQ ID NO: 4624 | SEQ ID NO: 6990 |
| rs2523589 | SEQ ID NO: 2259 | SEQ ID NO: 4625 | SEQ ID NO: 6991 |
| rs2747479 | SEQ ID NO: 2260 | SEQ ID NO: 4626 | SEQ ID NO: 6992 |
| rs3130244 | SEQ ID NO: 2261 | SEQ ID NO: 4627 | SEQ ID NO: 6993 |
| rs7357041 | SEQ ID NO: 2262 | SEQ ID NO: 4628 | SEQ ID NO: 6994 |
| rs4713504 | SEQ ID NO: 2263 | SEQ ID NO: 4629 | SEQ ID NO: 6995 |
| rs2187580 | SEQ ID NO: 2264 | SEQ ID NO: 4630 | SEQ ID NO: 6996 |
| rs3132945 | SEQ ID NO: 2265 | SEQ ID NO: 4631 | SEQ ID NO: 6997 |
| rs3998751 | SEQ ID NO: 2266 | SEQ ID NO: 4632 | SEQ ID NO: 6998 |
| rs2860580 | SEQ ID NO: 2267 | SEQ ID NO: 4633 | SEQ ID NO: 6999 |
| rs7757916 | SEQ ID NO: 2268 | SEQ ID NO: 4634 | SEQ ID NO: 7000 |
| rs3130014 | SEQ ID NO: 2269 | SEQ ID NO: 4635 | SEQ ID NO: 7001 |
| rs3830076 | SEQ ID NO: 2270 | SEQ ID NO: 4636 | SEQ ID NO: 7002 |
| rs2158280 | SEQ ID NO: 2271 | SEQ ID NO: 4637 | SEQ ID NO: 7003 |
| rs1233391 | SEQ ID NO: 2272 | SEQ ID NO: 4638 | SEQ ID NO: 7004 |
| rs2844477 | SEQ ID NO: 2273 | SEQ ID NO: 4639 | SEQ ID NO: 7005 |
| rs7453097 | SEQ ID NO: 2274 | SEQ ID NO: 4640 | SEQ ID NO: 7006 |
| rs3130816 | SEQ ID NO: 2275 | SEQ ID NO: 4641 | SEQ ID NO: 7007 |
| rs4151648 | SEQ ID NO: 2276 | SEQ ID NO: 4642 | SEQ ID NO: 7008 |
| rs3131090 | SEQ ID NO: 2277 | SEQ ID NO: 4643 | SEQ ID NO: 7009 |
| rs1063318 | SEQ ID NO: 2278 | SEQ ID NO: 4644 | SEQ ID NO: 7010 |
| rs3130660 | SEQ ID NO: 2279 | SEQ ID NO: 4645 | SEQ ID NO: 7011 |
| rs1264549 | SEQ ID NO: 2280 | SEQ ID NO: 4646 | SEQ ID NO: 7012 |
| rs2299851 | SEQ ID NO: 2281 | SEQ ID NO: 4647 | SEQ ID NO: 7013 |
| rs2844682 | SEQ ID NO: 2282 | SEQ ID NO: 4648 | SEQ ID NO: 7014 |
| rs2051625 | SEQ ID NO: 2283 | SEQ ID NO: 4649 | SEQ ID NO: 7015 |
| rs2178899 | SEQ ID NO: 2284 | SEQ ID NO: 4650 | SEQ ID NO: 7016 |
| rs3130389 | SEQ ID NO: 2285 | SEQ ID NO: 4651 | SEQ ID NO: 7017 |
| rs3749981 | SEQ ID NO: 2286 | SEQ ID NO: 4652 | SEQ ID NO: 7018 |
| rs1233386 | SEQ ID NO: 2287 | SEQ ID NO: 4653 | SEQ ID NO: 7019 |
| rs2142234 | SEQ ID NO: 2288 | SEQ ID NO: 4654 | SEQ ID NO: 7020 |
| rs2747419 | SEQ ID NO: 2289 | SEQ ID NO: 4655 | SEQ ID NO: 7021 |
| rs356971 | SEQ ID NO: 2290 | SEQ ID NO: 4656 | SEQ ID NO: 7022 |
| rs1079541 | SEQ ID NO: 2291 | SEQ ID NO: 4657 | SEQ ID NO: 7023 |
| rs2273192 | SEQ ID NO: 2292 | SEQ ID NO: 4658 | SEQ ID NO: 7024 |
| rs1015466 | SEQ ID NO: 2293 | SEQ ID NO: 4659 | SEQ ID NO: 7025 |
| rs4947324 | SEQ ID NO: 2294 | SEQ ID NO: 4660 | SEQ ID NO: 7026 |
| rs2071295 | SEQ ID NO: 2295 | SEQ ID NO: 4661 | SEQ ID NO: 7027 |
| rs3130010 | SEQ ID NO: 2296 | SEQ ID NO: 4662 | SEQ ID NO: 7028 |
| rs2517424 | SEQ ID NO: 2297 | SEQ ID NO: 4663 | SEQ ID NO: 7029 |
| rs3093986 | SEQ ID NO: 2298 | SEQ ID NO: 4664 | SEQ ID NO: 7030 |
| rs2006752 | SEQ ID NO: 2299 | SEQ ID NO: 4665 | SEQ ID NO: 7031 |
| rs2530699 | SEQ ID NO: 2300 | SEQ ID NO: 4666 | SEQ ID NO: 7032 |
| rs707917 | SEQ ID NO: 2301 | SEQ ID NO: 4667 | SEQ ID NO: 7033 |
| rs6531 | SEQ ID NO: 2302 | SEQ ID NO: 4668 | SEQ ID NO: 7034 |
| rs2206042 | SEQ ID NO: 2303 | SEQ ID NO: 4669 | SEQ ID NO: 7035 |
| rs6457452 | SEQ ID NO: 2304 | SEQ ID NO: 4670 | SEQ ID NO: 7036 |
| rs1362064 | SEQ ID NO: 2305 | SEQ ID NO: 4671 | SEQ ID NO: 7037 |
| rs4424066 | SEQ ID NO: 2306 | SEQ ID NO: 4672 | SEQ ID NO: 7038 |
| rs3094110 | SEQ ID NO: 2307 | SEQ ID NO: 4673 | SEQ ID NO: 7039 |
| rs2242668 | SEQ ID NO: 2308 | SEQ ID NO: 4674 | SEQ ID NO: 7040 |
| rs6910451 | SEQ ID NO: 2309 | SEQ ID NO: 4675 | SEQ ID NO: 7041 |
| rs3823355 | SEQ ID NO: 2310 | SEQ ID NO: 4676 | SEQ ID NO: 7042 |
| rs3130667 | SEQ ID NO: 2311 | SEQ ID NO: 4677 | SEQ ID NO: 7043 |
| rs2071293 | SEQ ID NO: 2312 | SEQ ID NO: 4678 | SEQ ID NO: 7044 |
| rs1063478 | SEQ ID NO: 2313 | SEQ ID NO: 4679 | SEQ ID NO: 7045 |
| rs2242654 | SEQ ID NO: 2314 | SEQ ID NO: 4680 | SEQ ID NO: 7046 |
| rs2394994 | SEQ ID NO: 2315 | SEQ ID NO: 4681 | SEQ ID NO: 7047 |
| rs3130805 | SEQ ID NO: 2316 | SEQ ID NO: 4682 | SEQ ID NO: 7048 |
| rs2269429 | SEQ ID NO: 2317 | SEQ ID NO: 4683 | SEQ ID NO: 7049 |
| rs3132587 | SEQ ID NO: 2318 | SEQ ID NO: 4684 | SEQ ID NO: 7050 |
| rs2300825 | SEQ ID NO: 2319 | SEQ ID NO: 4685 | SEQ ID NO: 7051 |
| rs7744304 | SEQ ID NO: 2320 | SEQ ID NO: 4686 | SEQ ID NO: 7052 |
| rs1233388 | SEQ ID NO: 2321 | SEQ ID NO: 4687 | SEQ ID NO: 7053 |
| rs4711279 | SEQ ID NO: 2322 | SEQ ID NO: 4688 | SEQ ID NO: 7054 |
| rs6915800 | SEQ ID NO: 2323 | SEQ ID NO: 4689 | SEQ ID NO: 7055 |
| rs11908 | SEQ ID NO: 2324 | SEQ ID NO: 4690 | SEQ ID NO: 7056 |
| rs1059288 | SEQ ID NO: 2325 | SEQ ID NO: 4691 | SEQ ID NO: 7057 |
| rs3025657 | SEQ ID NO: 2326 | SEQ ID NO: 4692 | SEQ ID NO: 7058 |
| rs213209 | SEQ ID NO: 2327 | SEQ ID NO: 4693 | SEQ ID NO: 7059 |
| rs7766900 | SEQ ID NO: 2328 | SEQ ID NO: 4694 | SEQ ID NO: 7060 |
| rs3130268 | SEQ ID NO: 2329 | SEQ ID NO: 4695 | SEQ ID NO: 7061 |
| rs3749952 | SEQ ID NO: 2330 | SEQ ID NO: 4696 | SEQ ID NO: 7062 |
| rs6456951 | SEQ ID NO: 2331 | SEQ ID NO: 4697 | SEQ ID NO: 7063 |
| rs2523974 | SEQ ID NO: 2332 | SEQ ID NO: 4698 | SEQ ID NO: 7064 |
| rs6904236 | SEQ ID NO: 2333 | SEQ ID NO: 4699 | SEQ ID NO: 7065 |
| rs4713518 | SEQ ID NO: 2334 | SEQ ID NO: 4700 | SEQ ID NO: 7066 |
| rs2267646 | SEQ ID NO: 2335 | SEQ ID NO: 4701 | SEQ ID NO: 7067 |
| rs502626 | SEQ ID NO: 2336 | SEQ ID NO: 4702 | SEQ ID NO: 7068 |
| rs6468 | SEQ ID NO: 2337 | SEQ ID NO: 4703 | SEQ ID NO: 7069 |
| rs3129110 | SEQ ID NO: 2338 | SEQ ID NO: 4704 | SEQ ID NO: 7070 |
| rs6456947 | SEQ ID NO: 2339 | SEQ ID NO: 4705 | SEQ ID NO: 7071 |
| rs3129154 | SEQ ID NO: 2340 | SEQ ID NO: 4706 | SEQ ID NO: 7072 |
| rs1009382 | SEQ ID NO: 2341 | SEQ ID NO: 4707 | SEQ ID NO: 7073 |
| rs1043618 | SEQ ID NO: 2342 | SEQ ID NO: 4708 | SEQ ID NO: 7074 |
| rs7754402 | SEQ ID NO: 2343 | SEQ ID NO: 4709 | SEQ ID NO: 7075 |
| rs2269706 | SEQ ID NO: 2344 | SEQ ID NO: 4710 | SEQ ID NO: 7076 |
| rs4713505 | SEQ ID NO: 2345 | SEQ ID NO: 4711 | SEQ ID NO: 7077 |
| rs205000 | SEQ ID NO: 2346 | SEQ ID NO: 4712 | SEQ ID NO: 7078 |
| rs2071278 | SEQ ID NO: 2347 | SEQ ID NO: 4713 | SEQ ID NO: 7079 |
| rs477005 | SEQ ID NO: 2348 | SEQ ID NO: 4714 | SEQ ID NO: 7080 |
| rs535586 | SEQ ID NO: 2349 | SEQ ID NO: 4715 | SEQ ID NO: 7081 |
| rs1052248 | SEQ ID NO: 2350 | SEQ ID NO: 4716 | SEQ ID NO: 7082 |
| rs621701 | SEQ ID NO: 2351 | SEQ ID NO: 4717 | SEQ ID NO: 7083 |
| rs2072679 | SEQ ID NO: 2352 | SEQ ID NO: 4718 | SEQ ID NO: 7084 |
| rs805257 | SEQ ID NO: 2353 | SEQ ID NO: 4719 | SEQ ID NO: 7085 |
| rs469064 | SEQ ID NO: 2354 | SEQ ID NO: 4720 | SEQ ID NO: 7086 |
| rs1264517 | SEQ ID NO: 2355 | SEQ ID NO: 4721 | SEQ ID NO: 7087 |
| rs211457 | SEQ ID NO: 2356 | SEQ ID NO: 4722 | SEQ ID NO: 7088 |
| rs537160 | SEQ ID NO: 2357 | SEQ ID NO: 4723 | SEQ ID NO: 7089 |
| rs2075800 | SEQ ID NO: 2358 | SEQ ID NO: 4724 | SEQ ID NO: 7090 |
| rs707926 | SEQ ID NO: 2359 | SEQ ID NO: 4725 | SEQ ID NO: 7091 |
| rs387608 | SEQ ID NO: 2360 | SEQ ID NO: 4726 | SEQ ID NO: 7092 |
| rs2071888 | SEQ ID NO: 2361 | SEQ ID NO: 4727 | SEQ ID NO: 7093 |
| rs2073524 | SEQ ID NO: 2362 | SEQ ID NO: 4728 | SEQ ID NO: 7094 |
| rs805306 | SEQ ID NO: 2363 | SEQ ID NO: 4729 | SEQ ID NO: 7095 |
| rs486416 | SEQ ID NO: 2364 | SEQ ID NO: 4730 | SEQ ID NO: 7096 |
| rs652888 | SEQ ID NO: 2365 | SEQ ID NO: 4731 | SEQ ID NO: 7097 |
| rs2075798 | SEQ ID NO: 2366 | SEQ ID NO: 4732 | SEQ ID NO: 7098 |

[0109] TABLE 3

| SNP Name | Allele sequence of first ASO | | Allele sequence of second ASO | | Locus sequence of LSO | |
|---|---|---|---|---|---|---|
| rs2395256 | TTTCAGCAAACACCTTTTTCCT | SEQ ID NO: 1 | TTTTCAGCAAACACCTTTTTCCCC | SEQ ID NO: 2367 | GACTGCATTCACAAACCTTACTA | SEQ ID NO: 4733 |
| rs1894411 | TGCAAAATTGCCTTCATAGAGGCTA | SEQ ID NO: 2 | TGCAAAATTGCCTTCATAGAGGCTG | SEQ ID NO: 2368 | ATTAATTTATAGTTCCAGCAGCA | SEQ ID NO: 4734 |
| rs2621414 | GAGGCCAGAGCAAATTTCCCCA | SEQ ID NO: 3 | GAGGCCAGAGCAAATTTCCCCG | SEQ ID NO: 2369 | ACTCCATTTCAAATACTTCAAATT | SEQ ID NO: 4735 |
| rs1264298 | CTTGGATTTCCCACAATATGGCTA | SEQ ID NO: 4 | CTTGGATTTCCCACAATATGGCTG | SEQ ID NO: 2370 | CCCTCCTCTCTTCCTATAGAATC | SEQ ID NO: 4736 |
| rs1264307 | TGGGATAACAGCTGAACTGGGATA | SEQ ID NO: 5 | TGGGATAACAGCTGAACTGGGATG | SEQ ID NO: 2371 | GTGGAGTTGATGACAGGAGTTAT | SEQ ID NO: 4737 |
| rs241454 | AGCAGACACTGGTAGGAACAAGGAA | SEQ ID NO: 6 | AGCAGACACTGGTAGGAACAAGGAG | SEQ ID NO: 2372 | GATATAGGAAGGCAATCTCATG | SEQ ID NO: 4738 |
| rs3134996 | TCTGGGGGCAGCATTTCTAGTTT | SEQ ID NO: 7 | TCTGGGGGCAGCATTTCTAGTTA | SEQ ID NO: 2373 | ATTACCATTGGCATTAAGGAAG | SEQ ID NO: 4739 |
| rs2294882 | TATGCCAGGCACGATGCTGAATA | SEQ ID NO: 8 | TATGCCAGGCACGATGCTGAATG | SEQ ID NO: 2374 | GTTATGGGAATTATTTCATTTTTT | SEQ ID NO: 4740 |
| rs2001100 | GGGAAGGACTGAGAGTCCCATTA | SEQ ID NO: 9 | GGGAAGGACTGAGAGTCCCATTT | SEQ ID NO: 2375 | GAAACTTCCCAAATCTTAACTG | SEQ ID NO: 4741 |
| rs2273017 | AATCTTGGCATCCCTCCCTCCA | SEQ ID NO: 10 | AATCTTGGCATCCCTCCCTGCG | SEQ ID NO: 2376 | GGTTTTCACAGGAAATCTTCAT | SEQ ID NO: 4742 |
| rs3817969 | TGAGGTTCACTGAGATTTGTTGGCA | SEQ ID NO: 11 | TGAGGTTCACTGAGATTTGTTGGCG | SEQ ID NO: 2377 | GAACAATTTCCTATGATCTTTAAAA | SEQ ID NO: 4743 |
| rs761189 | AAGGAAAGAACAGAGCAGCAGAATCA | SEQ ID NO: 12 | AAGGAAAGAACAGAGCAGCAGAATCT | SEQ ID NO: 2378 | CAATGAAAGAAGACTTATAGGGAC | SEQ ID NO: 4744 |
| rs3129736 | CCCTGCGAGTTGAGGCATGA | SEQ ID NO: 13 | CCCTGCGAGTTGAGGCATGG | SEQ ID NO: 2379 | GAGCAGAAGAGGACAGTTTTTAC | SEQ ID NO: 4745 |
| rs3763350 | TTCCCCTTTATCCCCTGCTAATCA | SEQ ID NO: 14 | TTCCCCTTTATCCCCTGCTAATCG | SEQ ID NO: 2380 | CCTGTCTTTATTCTTTTATCTGAAG | SEQ ID NO: 4746 |
| rs3135374 | TGGATTTGGCAACATGGAGCTAAA | SEQ ID NO: 15 | TGGATTTGGCAACATGGAGCTAAC | SEQ ID NO: 2381 | CATGTCAGTGACAAGGAGTTC | SEQ ID NO: 4747 |
| rs2294880 | ACAGGAAGCAAAGGGAAGCTCCA | SEQ ID NO: 16 | ACAGGAAGCAAAGGGAAGCTCCG | SEQ ID NO: 2382 | CTTTCCGTGTTGGTTAATTGT | SEQ ID NO: 4748 |
| rs397081 | CAAAGTTGTCCTGGGTTGACTCAA | SEQ ID NO: 17 | CAAAGTTGTCCTGGGTTGACTCAG | SEQ ID NO: 2383 | AAGGTAGGATGAGCATTCTGAG | SEQ ID NO: 4749 |
| rs3021302 | GATAATCAGGAAGGGCAAGGTTATGT | SEQ ID NO: 18 | GATAATCAGGAAGGGCAAGGTTATGC | SEQ ID NO: 2384 | GCAATAAGATCTTAACCCACAGT | SEQ ID NO: 4750 |
| rs3129871 | TTCCAGTCCTTTCTGTGGAAAGAAA | SEQ ID NO: 19 | TTCCAGTCCTTTCTGTGGAAAGAAC | SEQ ID NO: 2385 | TAACATTCTCCTTTTCATAACACT | SEQ ID NO: 4751 |
| rs365053 | CCTCCCTGTTGGTTACTCTTCATCTCT | SEQ ID NO: 20 | CCTCCCTGTTGGTTTACTCTTCATCTCG | SEQ ID NO: 2386 | CAACCTCTTACCATTGTAGTGTC | SEQ ID NO: 4752 |
| rs1264308 | GGTGAGGGAATGCCAGTTTATGTTT | SEQ ID NO: 21 | GGTGAGGGAATGCCAGTTTATGTTC | SEQ ID NO: 2387 | TGTTTACCTGGCAGTCTACAG | SEQ ID NO: 4753 |
| rs3806156 | CAAGGACATTTTGTGCTGGATTAAT | SEQ ID NO: 22 | CAAGGACATTTTGTGCTGGATTAAG | SEQ ID NO: 2388 | ACACTGGTTTGTCTAGAGATTTTT | SEQ ID NO: 4754 |
| rs2253588 | GAACAAAGGGTTAAAGGGCGCG | SEQ ID NO: 23 | GAACAAAGGGTTAAAGGGCGCC | SEQ ID NO: 2389 | TGTAAGAGAGCTCTCCATTCC | SEQ ID NO: 4755 |
| rs2074512 | TCTCTGCATATCACCATCATTGTCCT | SEQ ID NO: 24 | TCTCTGCATATCACCATCATTGTCCC | SEQ ID NO: 2390 | GTCTTTGTCTCTAGTACTGAACCTG | SEQ ID NO: 4756 |
| rs2076536 | TGCCTGCTTCCTTTTCAAATTCAA | SEQ ID NO: 25 | TGCCTGCTTCCTTTTCAAATTCAG | SEQ ID NO: 2391 | ATTTTTTCTTTCACTCTTATTGATT | SEQ ID NO: 4757 |
| rs1988563 | GGGTGGTAACCCAGCCACTCTTT | SEQ ID NO: 26 | GGGTGGTAACCCAGCCACTCTTA | SEQ ID NO: 2392 | TTCCCTTACTCTTCCTTCCAT | SEQ ID NO: 4758 |
| rs2253705 | GGGGTGGGACACAGAGTGGAAA | SEQ ID NO: 27 | GGGGTGGGACACAGAGTGGAAG | SEQ ID NO: 2393 | GAGGGGACTTCCTTCTATTTTC | SEQ ID NO: 4759 |
| rs1894412 | ATAGCAGGCAGCCTGGGTTTTCA | SEQ ID NO: 28 | ATAGCAGGCAGCCTGGGTTTTCG | SEQ ID NO: 2394 | CCCAGTCTTCTTCTGTTTTCA | SEQ ID NO: 4760 |
| rs2071554 | CCTTGAGTCATGGAGGAATCCAGTT | SEQ ID NO: 29 | CCTTGAGTCATGGAGGAATCGAGTC | SEQ ID NO: 2395 | GGTCAGATTCACTAGCAGAGC | SEQ ID NO: 4761 |
| rs2395264 | GGTTCATGCAAAAAAGCAACATTAGT | SEQ ID NO: 30 | GGTTCATGCAAAAAAGCAACATTAGC | SEQ ID NO: 2396 | GTAATATTTTGGGGGGACTACT | SEQ ID NO: 4762 |
| rs2071290 | GGGCAAGTAAGGAGACTGATACGAAGA | SEQ ID NO: 31 | GGGCAAGTAAGGAGACTGATACGAAGG | SEQ ID NO: 2397 | AGTAGGAAAGAAAAGGTACAGAGG | SEQ ID NO: 4763 |
| rs885912 | CCGAGGCTCTGGCACTCACTT | SEQ ID NO: 32 | CCGAGGGTCTGGCACTCACTG | SEQ ID NO: 2398 | CCTCCTCTGTAAATAAGGGGT | SEQ ID NO: 4764 |
| rs2073717 | CCTTTGGTGAAAATAAACACACATGGG | SEQ ID NO: 33 | CCTTTGGTGAAAATAAACACACATGGC | SEQ ID NO: 2399 | TAGAAAGATGGAGAATTTGGGTA | SEQ ID NO: 4765 |
| rs3873444 | CAAGGAAAGGAGTCAGGGGCTAAT | SEQ ID NO: 34 | CAAGGAAAGGAGTCAGGGGCTAAC | SEQ ID NO: 2400 | AAGGAATATTGTCCACCCCTA | SEQ ID NO: 4766 |
| rs261949 | GTGTGAAGGAACCTGGCCCAT | SEQ ID NO: 35 | GTGTGAAGGAACCTGGCCCAC | SEQ ID NO: 2401 | GAAGTTGCCCTGTAAATTCAG | SEQ ID NO: 4767 |
| rs2187818 | TGATCTTATTCCAGACCAGCGATACTA | SEQ ID NO: 36 | TGATCTTATTCCAGACCAGCGATACTC | SEQ ID NO: 2402 | GTAAGATACTCTTTCACAATGCC | SEQ ID NO: 4768 |
| rs2071550 | CAACCCCAATCCCACAGGTTTAAT | SEQ ID NO: 37 | CAACCCCAATCCCACAGGTTTAAG | SEQ ID NO: 2403 | CTGAAGGAGGAGAGAGGAAAG | SEQ ID NO: 4769 |
| rs1573649 | TCTGCAGAGCCATCTTCCAAGACA | SEQ ID NO: 38 | TCTGCAGAGCCATCTTCCAAGACG | SEQ ID NO: 2404 | AAGTGAGACCAAGGAAAAAGC | SEQ ID NO: 4770 |
| rs2395110 | TCTTGATCTCTGCCATCTGGAGGA | SEQ ID NO: 39 | TCTTTGATCTCTGCCATCTGGAGGG | SEQ ID NO: 2405 | GGAAATTCTTGGGTTCAAGTC | SEQ ID NO: 4771 |
| rs2073046 | AACAACTTTGGCATCTCTCCAGAT | SEQ ID NO: 40 | AACAACTTTGGCATCTCTCCAGAC | SEQ ID NO: 2406 | TTTCCATGGAAAGTCTTCTTC | SEQ ID NO: 4772 |
| rs2073047 | TTGTGCATAAGCTACAAGAGCTGAT | SEQ ID NO: 41 | TTGTGCATAAGCTACAAGAGCTGAC | SEQ ID NO: 2407 | ATGATAAGTGACTGTGTCAATCAC | SEQ ID NO: 4773 |
| rs743862 | TGGTTGAAAGATGTTTTGAGAGCTCTT | SEQ ID NO: 42 | TGGTTGAAAGATGTTTTGAGAGCTCTC | SEQ ID NO: 2408 | GATCAACTCACCAGATAGATGAT | SEQ ID NO: 4774 |
| rs2074488 | CAGACAGTGAGCTCGCCCTGT | SEQ ID NO: 43 | CAGAGAGTGAGCTCGCCCTGG | SEQ ID NO: 2409 | AATGGACGTGTAGAGTCAGGA | SEQ ID NO: 4775 |
| rs2072895 | AGAGTCCCAGGCGCCTTTACCG | SEQ ID NO: 44 | AGAGTCCCAGGCGCCTTTACCC | SEQ ID NO: 2410 | GGTTCATTTTCAGTTTAGGCC | SEQ ID NO: 4776 |
| rs2076537 | TTGCAGAAAGGTTGTGGAAAAGAA | SEQ ID NO: 45 | TTGCAGAAAGGTTGTGGAAAAGAG | SEQ ID NO: 2411 | ATAGAAATGAGTCACAACTTATTTCC | SEQ ID NO: 4777 |
| rs2072110 | CGTCCAGTGTCACAGGGGCT | SEQ ID NO: 46 | CGTCCAGTGTCACAGGGGCC | SEQ ID NO: 2412 | TGTGAAGATGAGGAGAAAGAG | SEQ ID NO: 4778 |
| rs13501 | TCAAAAGAGTTGCCTATACTCCCTGAT | SEQ ID NO: 47 | TCAAAAGAGTTGCCTATACTCCCTGAC | SEQ ID NO: 2413 | CCACTTATCTTCCTACTATCCTCT | SEQ ID NO: 4779 |
| rs2072896 | CACTCCCATTGGGCGTCGG | SEQ ID NO: 48 | CACTCCCATTGGGCGTCGC | SEQ ID NO: 2414 | TTTCTAGAGAAGCCAATCAGTG | SEQ ID NO: 4780 |
| rs2581 | GCTTCCCTTCCCATTCAACACAA | SEQ ID NO: 49 | GCTTCCCTTCCCATTCAACACAC | SEQ ID NO: 2415 | CACACATTCTTGCTCTACCC | SEQ ID NO: 4781 |
| rs2023472 | AGGCTCCCTGTGATGGAGTCA | SEQ ID NO: 50 | AGGCTCCCTGTGATGGAGTCG | SEQ ID NO: 2416 | GTCTTGATTTTGCTTCACTGAG | SEQ ID NO: 4782 |
| rs2006165 | TCATTGAGCTCATACCACATGCCA | SEQ ID NO: 51 | TCATTGAGCTCATACCACATGCCG | SEQ ID NO: 2417 | TCCACGAGTCAGGTACTAGG | SEQ ID NO: 4783 |
| rs2395533 | CCAGCATCTCATACACCACCATGT | SEQ ID NO: 52 | CCAGCATCTCATACACCACCATGC | SEQ ID NO: 2418 | CCTACTGCAAGTTCCATTG | SEQ ID NO: 4784 |
| rs2269703 | GGAGCCGAAAAGGGCGGTA | SEQ ID NO: 53 | GGAGCCGAAAAGGGCGGTG | SEQ ID NO: 2419 | CCGGAGTATTCTAAGTAAAGTGTT | SEQ ID NO: 4785 |
| rs259919 | TGCACACCACCTAGATTCTGTCAAAA | SEQ ID NO: 54 | TGCACACCACCTAGATTCTGTCAAAG | SEQ ID NO: 2420 | GAAGTCAGAAATTTATAATGTGATCA | SEQ ID NO: 4786 |
| rs1265760 | GGCCTCTACTCACTCTCCCCCAA | SEQ ID NO: 55 | GGCCTCTACTCACTCTCCCCCAG | SEQ ID NO: 2421 | ACCACACAATTTATTGTAATAAAAT | SEQ ID NO: 4787 |
| rs241428 | GGATTTTCCAACTCGAAGGATGAA | SEQ ID NO: 56 | GGATTTTCCAACTCGAAGGATGAC | SEQ ID NO: 2422 | GATGGGAATCACATGACTCTG | SEQ ID NO: 4788 |
| rs3763316 | GCACCTTGCCACCTGAAACTTACT | SEQ ID NO: 57 | GCACCTTGCCACCTGAAACTTACC | SEQ ID NO: 2423 | GTCACCTCCCCTTAGACTGAA | SEQ ID NO: 4789 |
| rs8084 | CCACTGGTGGGGTGAACTTGTCT | SEQ ID NO: 58 | CCACTGGTGGGGTGAACTTGTCG | SEQ ID NO: 2424 | TGAAACAGATGAGGACGTTG | SEQ ID NO: 4790 |
| rs1042337 | ATGGGCTCAGGAGCCCCAA | SEQ ID NO: 59 | ATGGGCTCAGGAGCCCCAG | SEQ ID NO: 2425 | GTGCTCTACCACACAGGTGTA | SEQ ID NO: 4791 |
| rs2269713 | GCCAGAAATACACCACCTACAGTACAAAT | SEQ ID NO: 60 | GCCAGAAATACACCACCTACAGTACAAAC | SEQ ID NO: 2426 | ATAATCTAAAAACAAGAGGGTGG | SEQ ID NO: 4792 |
| rs2239524 | GGGAGGGTGGGAGGAAGATCTTA | SEQ ID NO: 61 | GGGAGGGTGGGAGGAAGATCTTC | SEQ ID NO: 2427 | AGTGCCCACTATGTGTTAGGA | SEQ ID NO: 4793 |
| rs3115569 | AGGAATAAAAAGTAGGAAGCCAAAAT | SEQ ID NO: 62 | AGCAATAAAAAGTAGGAAGCCAAAAC | SEQ ID NO: 2428 | GAAGCACAGTACTATTTACAACCA | SEQ ID NO: 4794 |
| rs241448 | CTGCAGAAGCTTGCCCAGCTCT | SEQ ID NO: 63 | CTGCAGAAGCTTGCCCAGCTCC | SEQ ID NO: 2429 | GGAGGGACAGGACCTCTATT | SEQ ID NO: 4795 |
| rs2071475 | TTTCACGGTGTCTCATTTTTCCTCT | SEQ ID NO: 64 | TTTCACGGTGTCTCATTTTTCCTCC | SEQ ID NO: 2430 | TTCCTAGTGCAACCAGAGGT | SEQ ID NO: 4796 |
| rs365066 | GTGACAGTTTGGCCGTTGCGT | SEQ ID NO: 65 | GTGACAGTTTGGCCGTTGCGC | SEQ ID NO: 2431 | GCCAGGTGATATTGATCACAG | SEQ ID NO: 4797 |
| rs2022059 | AGTTGAGCAATCCGGGGGGG | SEQ ID NO: 66 | AGTTGAGCAATCCGGGGGGC | SEQ ID NO: 2432 | CCCACATACCAGTTTTCTCCT | SEQ ID NO: 4798 |
| rs2071474 | GGATTTAGACTTTCTGAGGTACTCCCAT | SEQ ID NO: 67 | GGATTTAGACTTTCTGAGGTACTCCCAC | SEQ ID NO: 2433 | ATTACTGCTTTCTCTTTGAGGG | SEQ ID NO: 4799 |
| rs3129745 | TTTGACTTGTTTTGGTTTGGTTTCCA | SEQ ID NO: 68 | TTTGACTTGTTTTGGTTTGGTTTCCG | SEQ ID NO: 2434 | TTGATACTGAGGATGAAGGGA | SEQ ID NO: 4800 |
| rs2213572 | CTCTGCGTGGTAGGTAAATTTTATGTT | SEQ ID NO: 69 | CTCTGCGTGGTAGGTAAATTTTATGTC | SEQ ID NO: 2435 | TTTCACATTCACAGGTATTTTTAT | SEQ ID NO: 4801 |
| rs2286656 | TCAGTTGCAAAGTCATACCCGGT | SEQ ID NO: 70 | TCAGTTGCAAAGTCATACCCGGC | SEQ ID NO: 2436 | CTGCGGATCCAGAAGTACAG | SEQ ID NO: 4802 |
| rs2070121 | GAGTGGCATTTGCAGCCTTCCTAT | SEQ ID NO: 71 | GAGTGGCATTGCAGCCTTCCTAC | SEQ ID NO: 2437 | TGGGCTAATCTTCCTTCTG | SEQ ID NO: 4803 |
| rs3117098 | TTTCACTTACTTTTGAGTCTTCCTTCCT | SEQ ID NO: 72 | TTTCACTTACTTTTGAGTCTTCCTTCCC | SEQ ID NO: 2438 | GTGAATGTAGCTCTTTGCTTGT | SEQ ID NO: 4804 |
| rs926594 | AGTGTCTCAATTCCTTTGCCCAA | SEQ ID NO: 73 | AGTGTCTCAATTCCTTTGCCCAC | SEQ ID NO: 2439 | ACTCATACCTATAAATGTCTTAAGTCA | SEQ ID NO: 4805 |
| rs2621393 | AGAGATTTCCCAGAACTCCGATAAC | SEQ ID NO: 74 | AGAGATTTCCCAGAACTCCGATAAG | SEQ ID NO: 2440 | TTTATTTTAACCTTTTTACCTCTGA | SEQ ID NO: 4806 |
| rs7192 | GCTGCATTGCTTTTGCGCAA | SEQ ID NO: 75 | GCTGCATTGCTTTTGCGCAC | SEQ ID NO: 2441 | CCCTTGATGATGAAGATGGT | SEQ ID NO: 4807 |
| rs14004 | CCATTTTCTTCTGGGCGCTCTT | SEQ ID NO: 76 | CCATTTTCTTCTTGGGCGCTCTG | SEQ ID NO: 2442 | TGGGAGTCAGTAGAGCTCG | SEQ ID NO: 4808 |
| rs3134943 | TTGACAGATTTGCCGGCTTCCT | SEQ ID NO: 77 | TTGACAGATTTGCCGGCTTCCC | SEQ ID NO: 2443 | TCTGACTTTTTCTGCCTCC | SEQ ID NO: 4809 |
| rs2213585 | TCTAACCCCATCTGCTCCCCTCT | SEQ ID NO: 78 | TCTAACCCCATCTGCTCCGCTCC | SEQ ID NO: 2444 | TCCCATGCATTCTGAGATC | SEQ ID NO: 4810 |
| rs2072894 | CTGCCCCTACCCAGCAGTGAT | SEQ ID NO: 79 | CTGCCCCTACCCAGCAGTGAC | SEQ ID NO: 2445 | TCTCCATTCCAGTCCAAGT | SEQ ID NO: 4811 |
| rs2286655 | GCCAGAGAAAAGGGGTGGGAT | SEQ ID NO: 80 | GCCAGAGAAAAGGGGTGGGAC | SEQ ID NO: 2446 | TCATGGTCCCTGAGAGTGAC | SEQ ID NO: 4812 |
| rs886420 | AGTGGGGTCTTGGGGCAGTAGT | SEQ ID NO: 81 | AGTGGGGTCTTGGGGCAGTAGC | SEQ ID NO: 2447 | AGAACTGAATACTTGGGTCTCTC | SEQ ID NO: 4813 |
| rs2074504 | GAGGTCCATTGACGCCTGGA | SEQ ID NO: 82 | GAGGTCCATTGACGCCTGGG | SEQ ID NO: 2448 | GGTAGAAGGCACAGAGGTC | SEQ ID NO: 4814 |
| rs2301270 | ATGCTCCTGCCCCTGCCA | SEQ ID NO: 83 | ATGCTCCTGCCCCTGCCC | SEQ ID NO: 2449 | GTGAGACACCTCACTCCCTCT | SEQ ID NO: 4815 |
| rs3763310 | GACACAGAGATGCCGTGGAAAA | SEQ ID NO: 84 | GACACAGAGATGCCGTGGAAAG | SEQ ID NO: 2450 | AAAGATAGTCGGGAAAATATCTG | SEQ ID NO: 4816 |
| rs241446 | CTCCAGCTGTGGCAGTACAGCT | SEQ ID NO: 85 | CTCCAGCTGTGGCAGTACAGCC | SEQ ID NO: 2451 | CTTTATCTACTGCCCTTTCCTAC | SEQ ID NO: 4817 |
| rs3129876 | TGAAGTAAGTCAAATTTGGTTTAGAGGA | SEQ ID NO: 86 | TGAAGTAAGTCAAATTTGGTTTAGAGGG | SEQ ID NO: 2452 | CAAAACTGAGTTGTGTATTGATG | SEQ ID NO: 4818 |
| rs1043483 | GGGTCCTGGCTGTGAGGCTA | SEQ ID NO: 87 | GGGTCCTGGCTGTGAGGCTG | SEQ ID NO: 2453 | CAAGCTGGTTCTGCAACTT | SEQ ID NO: 4819 |
| rs2286405 | CGCTCGATGCAGTCACAATGT | SEQ ID NO: 88 | CGCTCGATGCAGTCACAATGC | SEQ ID NO: 24S4 | ACTGCCTGTTTTTAGGAAGTATC | SEQ ID NO: 4820 |
| rs2284175 | AACCGTTTACTTAGAAGACCCAGATAAA | SEQ ID NO: 89 | AACCGTTTACTTAGAAGACCGAGATAAG | SEQ ID NO: 2455 | ACAGTTTTTAAGACACCAACTATTT | SEQ ID NO: 4821 |
| rs1362122 | TTAGAGCAATTTCCAACCCTTGCT | SEQ ID NO: 90 | TTAGAGCAATTTCCAACCCTTGCC | SEQ ID NO: 2456 | AGGCTGCTACACTTTTACCTATG | SEQ ID NO: 4822 |
| rs1265155 | AGCTGCTCCGGTTCCCCAA | SEQ ID NO: 91 | AGCTGCTCCGGTTCCCCAG | SEQ ID NO: 2457 | AACTCACAGACAACCGTGGT | SEQ ID NO: 4823 |
| rs2267641 | CCCAGCAGCCGAATGATGTTT | SEQ ID NO: 92 | CCCAGCAGCCGAATGATGTTG | SEQ ID NO: 2458 | ACATGATCTTCACCTCTTTCAG | SEQ ID NO: 4824 |
| rs2647089 | AGTTGGAATAAGCCCACTATAGTCTGTA | SEQ ID NO: 93 | AGTTGGAATAAGCCCACTATAGTCTGTG | SEQ ID NO: 2459 | CTTACACTAATTATAATGGGAAACA | SEQ ID NO: 4825 |
| rs2240619 | GAGGGCGATATTCTGGTGGTGT | SEQ ID NO: 94 | GAGGGCGATATTCTGGTGGTGG | SEQ ID NO: 2460 | TCCATTTTCTTCCCCTCCT | SEQ ID NO: 4826 |
| rs1061808 | AGGTGCTGAGGAAAGCTCCCAT | SEQ ID NO: 95 | AGGTGCTGAGGAAAGCTCCCAG | SEQ ID NO: 2461 | AGTGCTTCAGGTATCAGCTTC | SEQ ID NO: 4827 |
| rs2249099 | GGTCAGGTGCTGAGGCGCA | SEQ ID NO: 96 | GGTCAGGTGCTGAGGCGCC | SEQ ID NO: 2462 | AGGAGAGGACATGGCTCACT | SEQ ID NO: 4828 |
| rs1264309 | TGGAGTCTTGCCTTTGCTCTCCTT | SEQ ID NO: 97 | TGGAGTCTTGCCTTTGCTCTCCTC | SEQ ID NO: 2463 | GTCTGACTACAAATCCCGAAAG | SEQ ID NO: 4829 |
| rs3763305 | CAGAGGGAGGGGAGCTACCAT | SEQ ID NO: 98 | CAGAGGGAGGGGAGCTACCAC | SEQ ID NO: 2464 | AAAAACTGAGGCACGATTTTAC | SEQ ID NO: 4830 |
| rs2073724 | ACCGGTGGCGGGTTCTCAA | SEQ ID NO: 99 | ACCGGTGGCGGGTTCTCAG | SEQ ID NO: 2465 | AGGCTCACTCTCATCATCCA | SEQ ID NO: 4831 |
| rs2582 | GGCACTGAGCACGCAGGGT | SEQ ID NO: 100 | GGCACTGAGCACGCAGGGG | SEQ ID NO: 2466 | TGTCACAAACCCATGAGGAT | SEQ ID NO: 4832 |
| rs2074484 | GAACAAAGTGGGCGTCCGCT | SEQ ID NO: 101 | GAACAAAGTGGGCGTCCGCG | SEQ ID NO: 2467 | GGATTACTAGGGCGGAGAG | SEQ ID NO: 4833 |
| rs3134945 | TCGCTTATATACTGGAGAGGCTAGGAGA | SEQ ID NO: 102 | TCGCTTATATACTGGAGAGGGTAGGAGC | SEQ ID NO: 2468 | CATACAGTCATACAGATAATCGGA | SEQ ID NO: 4834 |
| rs2269418 | CAACACCTCTGCAATCAAGAACTGAT | SEQ ID NO: 103 | CAACACCTCTGCAATCAAGAACTGAG | SEQ ID NO: 2469 | TGTCTGTGTGGTTTTGATT | SEQ ID NO: 4835 |
| rs3749968 | TGGATTTCATCTCTCAATAATTCTGCTTAT | SEQ ID NO: 104 | TGGATTTCATCTCTCAATAATTCTGCTTAC | SEQ ID NO: 2470 | TGTTATTTCATAATATTGTTCAGTTT | SEQ ID NO: 4836 |
| rs2856705 | GACATCTTTCTACTCAGTTACCATTAGGAA | SEQ ID NO: 105 | GACATCTTTCTACTCAGTTACCATTAGGAG | SEQ ID NO: 2471 | GAGAAAAATATACTAAGAAAGGCAA | SEQ ID NO: 4837 |
| rs2071283 | CAGAGGCACTGGAAGGAGCCT | SEQ ID NO: 106 | CAGAGGCACTGGAAGGAGCCC | SEQ ID NO: 2472 | GGGTGTTATGGCAGGAGGT | SEQ ID NO: 4838 |
| rs2239518 | ATGTGGAGGTGGAATGCCCACA | SEQ ID NO: 107 | ATGTGGAGGTGGAATGCCCACG | SEQ ID NO: 2473 | GAGGCCAAGGGTCACTTC | SEQ ID NO: 4839 |
| rs2240804 | GGCCAGATCCCTTCCCCACA | SEQ ID NO: 108 | GGCCAGATCCCTTCCCCACG | SEQ ID NO: 2474 | TGATCTTGGAGTAGGCGC | SEQ ID NO: 4840 |
| rs2076525 | GCACCTCGTATTTTTATCAAGAGACATTA | SEQ ID NO: 109 | GCACCTCGTATTTTTATCAAGAGACATTG | SEQ ID NO: 2475 | TAGCAATATGTATTGAAAGCCAT | SEQ ID NO: 4841 |
| rs3806157 | TGCAAATTGAAGAGATGAAACAGTTAT | SEQ ID NO: 110 | TGCAAATTGAAGAGATGTTTAACAGTTAG | SEQ ID NO: 2476 | TATGTTATTATGTTTGATCATTTTATG | SEQ ID NO: 4842 |
| rs2187823 | CAGGATCCAAACAGTGATCAGTTCCT | SEQ ID NO: 111 | CAGGATCCAAACAGTGATCAGTTCCG | SEQ ID NO: 2477 | GATCCCTGGTTTATTCATGTAA | SEQ ID NO: 4843 |
| rs3129858 | TGCAGCATGGACCACTGCTCA | SEQ ID NO: 112 | TGCAGCATGGACCACTGCTCG | SEQ ID NO: 2478 | GTACAGATGCTCTCCAACTTAAC | SEQ ID NO: 4844 |
| rs3135396 | TCCTGTGTTAATAGAGGGCTCCACA | SEQ ID NO: 113 | TCCTGTGTTAATAGAGGGCTCCACG | SEQ ID NO: 2479 | TGACTGGACTCATCTTTAACCT | SEQ ID NO: 4845 |
| rs1736917 | GTCGCTGCTGTGCTGTGGAGA | SEQ ID NO: 114 | GTCGCTGCTGTGCTGTGGAGG | SEQ ID NO: 2480 | AGAAGAGCTCAGGTAAGGAAG | SEQ ID NO: 4846 |
| rs3213485 | GGAGATTCGTAGAAACTGGCAAACTTT | SEQ ID NO: 115 | GGAGATTCGTAGAAACTGGCAAACTTC | SEQ ID NO: 2481 | CCCCTAAGTCTTAACCCTCATA | SEQ ID NO: 4847 |
| rs184003 | CCCTCTGCCCTCCCTGTTGA | SEQ ID NO: 116 | CCCTCTGOCCTCCCTGTTGC | SEQ ID NO: 2482 | AGTTATGGTTCACCCTACCTC | SEQ ID NO: 4848 |
| rs2647086 | CAACCTTTCTGGCCAGAGGAACC | SEQ ID NO: 117 | CAACCTTTCTGGCCAGAGGAACG | SEQ ID NO: 2483 | GTAAGAGGGACCTATGGGAC | SEQ ID NO: 4849 |
| rs2235383 | TCTGTCCTTCATTTTCACAGGAGCT | SEQ ID NO: 118 | TCTGTCCTTCATTTTCACAGGAGCC | SEQ ID NO: 2484 | TACAAATGAGTAGGTGCTGGC | SEQ ID NO: 4850 |
| rs3817970 | CATTCTATTAACAGCCAAACAGGAAGAT | SEQ ID NO: 119 | CATTCTATTAACAGCCAAACAGGAAGAC | SEQ ID NO: 2485 | AGTGTTTCACGGACATAAGAAAT | SEQ ID NO: 4851 |
| rs2213574 | TCTCAGAGGAAATGGGTCCACAGA | SEQ ID NO: 120 | TCTCAGAGGAAATGGGTCCACAGG | SEQ ID NO: 2486 | ACCTGAGGGCTCTAAACAGCTA | SEQ ID NO: 4852 |
| rs2858857 | GCCTCTTCCCTTTGCAGGGT | SEQ ID NO: 121 | GCCTCTTCCCTTTGCAGGGC | SEQ ID NO: 2487 | AAAAGCCAGGAGCTACACAC | SEQ ID NO: 4853 |
| rs2227139 | GATGAGAGGAAGGAATATTTGAAACACA | SEQ ID NO: 122 | GATGAGAGGAAGGAATATTTGAAACACG | SEQ ID NO: 2488 | TGAACTGTTGCTCATTTGTCTAT | SEQ ID NO: 4854 |
| rs709052 | CTGGTCTGGTCTCCACAAGCTCA | SEQ ID NO: 123 | CTGGTCTGGTCTCCACAAGCTCG | SEQ ID NO: 2489 | TGTCCTGAGTTTGGTCCTC | SEQ ID NO: 4855 |
| rs2239519 | GTGTTCCATCACCTGGGGAACT | SEQ ID NO: 124 | GTGTTCCATCACCTGGGGAACC | SEQ ID NO: 2490 | TCTCCTTCTCAGAAATGGG | SEQ ID NO: 4856 |
| rs3844313 | GCTCCTCTTGGCAGTGACTAGGGA | SEQ ID NO: 125 | GCTCCTCTTGGCAGTGACTAGGGG | SEQ ID NO: 2491 | AGTACTAATGGTTATAAAGCAATTAGA | SEQ ID NO: 4857 |
| rs2076534 | GATAGCAGGAGACCTCGTCAGAGAT | SEQ ID NO: 126 | GATAGCAGGAGACCTCGTCAGAGAG | SEQ ID NO: 2492 | AGCAAATAAATCACAAAGGA | SEQ ID NO: 4858 |
| rs2074490 | CACTCCCATTGGGTGTCGGA | SEQ ID NO: 127 | CACTCCCATTGGGTGTCGGG | SEQ ID NO: 2493 | TCTAGAGAAGCCAATCAGCGT | SEQ ID NO: 4859 |
| rs1049033 | GACTACAGCTGCAAGGACAACCAGA | SEQ ID NO: 128 | GACTACAGCTGCAAGGACAACCAGG | SEQ ID NO: 2494 | CAGCAACGATACCCATGAT | SEQ ID NO: 4860 |
| rs206019 | GCTCTCCAGTCAGTGCCGGT | SEQ ID NO: 129 | GCTCTCCAGTCAGTGCCGGC | SEQ ID NO: 2495 | TTGGTTACCTTGGCTCAGT | SEQ ID NO: 4861 |
| rs1265157 | AGATGGGAGGGCATATGAGAGCC | SEQ ID NO: 130 | AGATGGGAGGGCATATGAGAGCG | SEQ ID NO: 2496 | TTGGAAGGAAGTTTAGAGTTCAT | SEQ ID NO: 4862 |
| rs1044043 | TGTTTCACAATTGCCATGTGGATTA | SEQ ID NO: 131 | TGTTTCACAATTGCCATGTGGATTC | SEQ ID NO: 2497 | AGGCATAAAGGACTTGAAACTC | SEQ ID NO: 4863 |
| rs1615839 | CCACTCCGCCCACCTTCCC | SEQ ID NO: 132 | CCACTCCGCCCACCTTCCG | SEQ ID NO: 2498 | GCAGGTAGGTTTTGAGCAG | SEQ ID NO: 4864 |
| rs2071555 | CTTGTCATGCCTCACAGCAGTGA | SEQ ID NO: 133 | CTTGTCATGCCTCACAGCAGTGC | SEQ ID NO: 2499 | AATGGAGACTGGACATACCAG | SEQ ID NO: 4865 |
| rs241441 | CCCGCAGCCAGCTGGCTT | SEQ ID NO: 134 | CCCGCAGCCAGCTGGCTC | SEQ ID NO: 2500 | CCTTCTCCCCTACATCTGAG | SEQ ID NO: 4866 |
| rs1624278 | GGTGGGGCCAGGTTCTCAT | SEQ ID NO: 135 | GGTGGGGCCAGGTTCTCAC | SEQ ID NO: 2501 | CCCTCCAGTGGATGATTG | SEQ ID NO: 4867 |
| rs2395195 | GTTTGGAGGAATTTTTGGTTGTCAT | SEQ ID NO: 136 | GTTTGGAGGAATTTTTGGTTGTCAC | SEQ ID NO: 2502 | ACAGGGATTTCTTCTGATATTTAA | SEQ ID NO: 4868 |
| rs915687 | CCTTTCTGGCCTCTCACAGGACA | SEQ ID NO: 137 | CCTTTCTGGCCTCTCACAGGACG | SEQ ID NO: 2503 | TTTCTTCCCACAGATTGAAAA | SEQ ID NO: 4869 |
| rs1964995 | CCCTTTAACTGCAGCTCACATTATTTTT | SEQ ID NO: 138 | CCCTTTAACTGCAGCTCACATTATTTTC | SEQ ID NO: 2504 | TTATTCCTTGATTCTAAAGCAATT | SEQ ID NO: 4870 |
| rs3117226 | GCTTGCGGTGATAACCATTCAACA | SEQ ID NO: 139 | GCTTGCGGTGATAACCATTCAACG | SEQ ID NO: 2505 | ACATTCTATTGGTTTGTGTGTTT | SEQ ID NO: 4871 |
| rs2858333 | TTGAGGCAAAGTGGGAAGAGAAAA | SEQ ID NO: 140 | TTGAGGCAAAGTGGGAAGAGAAAG | SEQ ID NO: 2506 | TGAGCAAAAATATAAAGGGAAAT | SEQ ID NO: 4872 |
| rs3025644 | CAGACCTGCCTTTGGGTAGGGT | SEQ ID NO: 141 | CAGACCTGCCAAGGGTAGGGA | SEQ ID NO: 2507 | CAGATCACTTTCTAACTCTGGAA | SEQ ID NO: 4873 |
| rs3129939 | CTCCCATCAGCCCTGTTTTACCTA | SEQ ID NO: 142 | CTCCCATCAGCCCTGTTTTACCTG | SEQ ID NO: 2508 | CTTTTCACACTACTTATGCTTTGA | SEQ ID NO: 4874 |
| rs2534655 | AGGGGTAGGAAGGTTGTAGCCCT | SEQ ID NO: 143 | AGGGGTAGGAAGGTTGTAGCCCC | SEQ ID NO: 2509 | GAGAAGTTTTATAGTGGGGTCAGT | SEQ ID NO: 4875 |
| rs2144425 | CAAATTCTTGGGCATGAAGTCGT | SEQ ID NO: 144 | CAAATTCTTGGGCATGAAGTCGC | SEQ ID NO: 2510 | CATAACGACCTTTTACAATGTTT | SEQ ID NO: 4876 |
| rs2523969 | GATATGCTGGGCTCTGGCTTGT | SEQ ID NO: 145 | GATATGCTGGGCTCTGGCTTGA | SEQ ID NO: 2511 | TCTCCAGAATATCTCTCTGACCT | SEQ ID NO: 4877 |
| rs2746149 | TGGACTCCCGTGACTGAGACCA | SEQ ID NO: 146 | TGGACTCCCGTGACTGAGACCG | SEQ ID NO: 2512 | AAACCGAGTAGCTTAAACTACAGA | SEQ ID NO: 4878 |
| rs1265048 | CTACTGGTGGTCAGATGTGCCAT | SEQ ID NO: 147 | CTACTGGTGGTCAGATGTGCCAC | SEQ ID NO: 2513 | GAGTATAAGAAACCTTGGGAGAA | SEQ ID NO: 4879 |
| rs2535276 | CTACTGGTGGTCAGATGTGCCAT | SEQ ID NO: 148 | CTACTGGTGGTCAGATGTGCCAC | SEQ ID NO: 2514 | GAGTATAAGAAACCTTGGGAGAA | SEQ ID NO: 4880 |
| rs3129267 | TAAGCTGGCAGTCCTAACCCCAG | SEQ ID NO: 149 | TAAGCTGGCAGTCCTAACCCCAC | SEQ ID NO: 2515 | GTGTTTATTCTACTCCAGGTGTC | SEQ ID NO: 4881 |
| rs3095314 | TGGCCACATGGAGCAAGTTTAAT | SEQ ID NO: 150 | TGGCCACATGGAGCAAGAAAAC | SEQ ID NO: 2516 | ACCAAAGATTTGGAGCTTTAAT | SEQ ID NO: 4882 |
| rs2844720 | CTCAAGCTGCAAACAGGATCCAT | SEQ ID NO: 151 | CTCAAGCTGCAAACAGGATCCAC | SEQ ID NO: 2517 | AAATAGCCAAAAGACAGTGTTC | SEQ ID NO: 4883 |
| rs2294476 | GCAGAGTTTGTGCAGACACACAGAT | SEQ ID NO: 152 | GCAGAGTTTGTGCAGACACACAGAC | SEQ ID NO: 2518 | CTCTGGGGAGTATATGTTTGAAT | SEQ ID NO: 4884 |
| rs2394517 | ATGAGGGTCAGCTCATTTGCCTA | SEQ ID NO: 153 | ATGAGGGTCAGCTCATTTGCCTG | SEQ ID NO: 2519 | GTATCAACACATGATAATCGCA | SEQ ID NO: 4885 |
| rs916571 | CAAAAGCACACAGAGACCTCCTGT | SEQ ID NO: 154 | CAAAAGCACACAGAGACCTCCTGC | SEQ ID NO: 2520 | TTGTGATTAGATTTTCATTGCAT | SEQ ID NO: 4886 |
| rs3129941 | TTTTGTTAACAAGATGGGCACGAT | SEQ ID NO: 155 | TTTTGTTAACAAGATGGGCACGAC | SEQ ID NO: 2521 | TAAGCAAAGTGGTGAGTAATAATG | SEQ ID NO: 4887 |
| rs3817659 | CTGCATCCAGTGGAACTAAAGCCA | SEQ ID NO: 156 | CTGCATCCAGTGGAACTAAAGCCG | SEQ ID NO: 2522 | TCCAGGATTATCTAAAACTGAG | SEQ ID NO: 4888 |
| rs2596449 | CGGGATGATAGCAGCTCTCCTACA | SEQ ID NO: 157 | CGGGATGATAGCAGCTCTCCTACG | SEQ ID NO: 2523 | AATAATGCTTATATGACAAGGGC | SEQ ID NO: 4889 |
| rs176250 | ACTGATGGGTGGGGAATGTTGAA | SEQ ID NO: 158 | ACTGATGGGTGGGGAATGTTGAG | SEQ ID NO: 2524 | ACAGTGGTAGGTATCTCAGGTG | SEQ ID NO: 4890 |
| rs6457116 | CAGGTGTCTGGAGTGCAGGTACAT | SEQ ID NO: 159 | CAGGTGTCTGGAGTGCAGGTACAC | SEQ ID NO: 2525 | TGGGACAGTTTCAACAAACTAT | SEQ ID NO: 4891 |
| rs2524070 | TGGAGAGGAAACTACTGGCTTGGT | SEQ ID NO: 160 | TGGAGAGGAAACTACTGGCTTGGC | SEQ ID NO: 2526 | GAACAATCAGGAATTACTTTTTCA | SEQ ID NO: 4892 |
| rs2857178 | AGTTGGCCATCTTTGCATATGCTA | SEQ ID NO: 161 | AGTTGGCCATCTTTGCATATGCTG | SEQ ID NO: 2527 | TTTCCATTTGAGTTTCTTCTGT | SEQ ID NO: 4893 |
| rs3218822 | AACACAGACAACTCACCACCACCTA | SEQ ID NO: 162 | AACACAGACAACTCACCACCACCTG | SEQ ID NO: 2528 | TATAACAGACTCAGAGCTAGCCTT | SEQ ID NO: 4894 |
| rs3517981 | GTTGCCAAGCACATGTTGCAAA | SEQ ID NO: 163 | GTTGCCAAGCACATGTTGCAAC | SEQ ID NO: 2529 | AAAGAGTCATCTCTGTGTCACC | SEQ ID NO: 4895 |
| rs1610735 | TGCCTCCTGATCTATCGACAGACTT | SEQ ID NO: 164 | TGCCTCCTGATCTATCGACAGACTG | SEQ ID NO: 2530 | GAAGATCAACACTAGGATGATGA | SEQ ID NO: 4896 |
| rs2394737 | AGGCAGGTTGTGCAGAGGATCT | SEQ ID NO: 165 | AGGCAGGTTGTGCAGAGGATCC | SEQ ID NO: 2531 | GTAGGGGAGATAGAGGACAGTT | SEQ ID NO: 4897 |
| rs2239530 | GCAGTAGCCGAAGGTTTTCCTTCTC | SEQ ID NO: 166 | GGAGTAGCCGAAGGTTTTCCTTCTG | SEQ ID NO: 2532 | GCCTTCTGTAACAGTGTAACTTT | SEQ ID NO: 4898 |
| rs4415152 | AATGGTCACATGAAAATGCATGAAT | SEQ ID NO: 167 | AATGGTCACATGAAAATGCATGAAC | SEQ ID NO: 2533 | TGCTAAGAACTTTTCTGCAATAG | SEQ ID NO: 4899 |
| rs4434496 | AACCTTGGACAGAGGCAGAACTCTT | SEQ ID NO: 168 | AACCTTGGACAGAGGCAGAACTCTC | SEQ ID NO: 2534 | TTTCTGTAGTTAAGCCTTCTCAG | SEQ ID NO: 4900 |
| rs3130602 | CCCAGCCCTGTGTAGTTAGAGCAGA | SEQ ID NO: 169 | CCCAGCCCTGTGTAGTTAGAGCAGG | SEQ ID NO: 2535 | ATCAAGATCTCAACACAAATGTG | SEQ ID NO: 4901 |
| rs211456 | GGTGTTGGAGATTTGGGGTACAAAT | SEQ ID NO: 170 | GGTGTTGGAGATTTGGGGTACAAAG | SEQ ID NO: 2536 | CACAGGTTTTGATGATTAGAACA | SEQ ID NO: 4902 |
| rs3091282 | CGATGATGAGCAGAGCTTCCTGG | SEQ ID NO: 171 | CGATGATGAGCAGAGCTTCCTGC | SEQ ID NO: 2537 | TGACTTACTTTGGACGTGTAAC | SEQ ID NO: 4903 |
| rs4959036 | GTGGTTCCATTTCCCCTTGGAT | SEQ ID NO: 172 | GTGGTTCCATTTCCCCTTGGAG | SEQ ID NO: 2538 | GGATACTAATCCCAAAGGAATG | SEQ ID NO: 4904 |
| rs2524103 | CAGGAAGTCTGGAGTCGAGCAAGA | SEQ ID NO: 173 | CAGGAAGTCTGGAGTCGAGCAAGG | SEQ ID NO: 2539 | ATTCTGGATTTATGACAAGGCT | SEQ ID NO: 4905 |
| rs45855 | GTGAGCCACTTTGCCTTTCTGAA | SEQ ID NO: 174 | GTGAGCCACTTTGCCTTTCTGAT | SEQ ID NO: 2S40 | CTCATTTCCTAATCTTTAAGTGG | SEQ ID NO: 4906 |
| rs3130404 | AGATCATGTGGGCATAGGGCTCA | SEQ ID NO: 175 | AGATCATGTGGGCATAGGGCTCG | SEQ ID NO: 2541 | GTATGTGGGAAGGATTTTGATT | SEQ ID NO: 4907 |
| rs211453 | ACCCTCTGGCTCATGTTGGGTA | SEQ ID NO: 176 | ACCCTCTGGCTCATGTTGGGTC | SEQ ID NO: 2542 | TCATCTTGTTTAGTCTGCATCTG | SEQ ID NO: 4908 |
| rs3135375 | TGTTGCCAAATCCAATGGTCATT | SEQ ID NO: 177 | TGTTGCCAAATCCAATGGTCATC | SEQ ID NO: 2543 | CTAGGATGTCATTTTATTCATCAT | SEQ ID NO: 4909 |
| rs3129767 | CCACAATGTACACATCCCAGGATTTT | SEQ ID NO: 178 | CCACAATGTACACATCCCAGGATTTG | SEQ ID NO: 2544 | GGCTGACTTTAAAACTACAAACA | SEQ ID NO: 4910 |
| rs7744593 | GGAATATTGGTGTCCATGGGATTTA | SEQ ID NO: 179 | GGAATATTGGTGTCCATGGGATTTT | SEQ ID NO: 2545 | GCACCATAAGAAATGTAAAAGG | SEQ ID NO: 4911 |
| rs2734979 | GAGTCGTTGAGTGTGAGGAAAGCTA | SEQ ID NO: 180 | GAGTCGTTGAGTGTGAGGAAAGCTG | SEQ ID NO: 2546 | AGAGAAGTAAAGACAGGTGGAGA | SEQ ID NO: 4912 |
| rs3094149 | GCTTGAATCCCATGTTTACACCCAG | SEQ ID NO: 181 | GCTTGAATCCCATGTTTACACCCAC | SEQ ID NO: 2547 | GAAAATACCCAAGTCTGAAGTG | SEQ ID NO: 4913 |
| rs2517723 | TCCCTTTGGGCTTCAGCACAA | SEQ ID NO: 182 | TCCCTTTGGGCTTCAGCACAG | SEQ ID NO: 2548 | GAGATCCCTTACTCTCCAGACTA | SEQ ID NO: 4914 |
| rs1632995 | GATTTCAAGCCCCAGGTAGGAGTA | SEQ ID NO: 183 | GATTTCAAGCCCCAGGTAGGAGTT | SEQ ID NO: 2549 | GCTCATATCTTGCCTAGTTGTG | SEQ ID NO: 4915 |
| rs4248143 | ACCAACTCTACCCCAAGCCCAT | SEQ ID NO: 184 | ACCAACTCTACCCCAAGCCCAC | SEQ ID NO: 2550 | CAGAATTACTAGAACTCCTGGTC | SEQ ID NO: 4916 |
| rs8807 | GGGAAGGTGACAGTGAGGGGT | SEQ ID NO: 185 | GGGAAGGTGACAGTGAGGGGC | SEQ ID NO: 2551 | CTTCAAAGGAGAACAGAGGATAA | SEQ ID NO: 4917 |
| rs3130745 | TTCCATCTGGACCAGTGCCACA | SEQ ID NO: 186 | TTCCATCTGGACCAGTGCCACC | SEQ ID NO: 2552 | CCTTTGTTTGTCTACTTAAACTTG | SEQ ID NO: 4918 |
| rs2858331 | TCTCCAGAGAGTGTGTGGAGCAATAT | SEQ ID NO: 187 | TCTCCAGAGAGTGTGTGGAGCAATAC | SEQ ID NO: 2553 | CCTTTTTTTGGAACTTTACTTCTT | SEQ ID NO: 4919 |
| rs2596503 | TGGGAAGAGGCAGACGATAGATACAT | SEQ ID NO: 188 | TGGGAAGAGGCAGACGATAGATACAC | SEQ ID NO: 2554 | ATAACCAGAGTAAGGAAGGAAAG | SEQ ID NO: 4920 |
| rs2517529 | CCTGTCACTTGTAACCCTGTGTGAG | SEQ ID NO: 189 | CCTGTCACTTGTAACCCTGTGTGAC | SEQ ID NO: 2555 | TGCTTAATCCCTCTAAATCTCAG | SEQ ID NO: 4921 |
| rs761188 | CCCTGTTGAAGCAGTTAGGTGGTAAT | SEQ ID NO: 190 | CCCTGTTGAAGCAGTTAGGTGGTAAC | SEQ ID NO: 2556 | GTTTGGTGTAACAAAAAATCTTTT | SEQ ID NO: 4922 |
| rs2295664 | GTCAGAGTAATGGTGAGGGGCAGT | SEQ ID NO: 191 | GTCAGAGTAATGGTGAGGGGCAGG | SEQ ID NO: 2557 | GTGACGTTATTTCATTACACGG | SEQ ID NO: 4923 |
| rs2523504 | CCGTCTTTGAGATGGGGAGCT | SEQ ID NO: 192 | CCGTCTTTGAGATGGGGAGCC | SEQ ID NO: 2558 | CAAAAGTAAGACCTGATGTCCT | SEQ ID NO: 4924 |
| rs7381625 | TGTTTACATTCAACTGCACTGACCAA | SEQ ID NO: 193 | TGTTTACATTCAACTGCACTGACCAG | SEQ ID NO: 2559 | CACAGATTCTAAGAGATGCTGAC | SEQ ID NO: 4925 |
| rs407161 | TTTGCCCTCAAGATTCTTTCTTTGT | SEQ ID NO: 194 | TTTGCCCTCAAGATTCTTTCTTTGC | SEQ ID NO: 2560 | TCTTGGCAGTTTGATTATAATGT | SEQ ID NO: 4926 |
| rs3900268 | AACTGGAATGAGTCAGGCTGGGA | SEQ ID NO: 195 | AACTGGAATGAGTCAGGCTGGGG | SEQ ID NO: 2561 | AAGTAATCAGGATGAGTCAGGG | SEQ ID NO: 4927 |
| rs3117123 | ACCCCCAGGACATCATTAAATGTA | SEQ ID NO: 196 | ACCCCCAGGACATCATTAAATGTG | SEQ ID NO: 2562 | TTACTCTTCCAATCCAAAGTATTC | SEQ ID NO: 4928 |
| rs211455 | GGTGGTTTGGACTGTTATTCCCAATT | SEQ ID NO: 197 | GGTGGTTTGGACTGTTATTCCCAATC | SEQ ID NO: 2563 | TTTGGTTCCTCCTTATTATTTAAG | SEQ ID NO: 4929 |
| rs7451341 | CAAAGGCTTGCTGCAATCTGGA | SEQ ID NO: 198 | CAAAGGCTTGCTGCAATCTGGG | SEQ ID NO: 2564 | AGTGAAGTTCAAGAATAATAGCTG | SEQ ID NO: 4930 |
| rs3095312 | GGCAGCCAGGAGGACTGTGAG | SEQ ID NO: 199 | GGCAGCCAGGAGGACTGTGAC | SEQ ID NO: 2565 | AAGAAAACAAGACAAACAAGCT | SEQ ID NO: 4931 |
| rs6932266 | CGGTGTTTCCACAGTATCCATCACT | SEQ ID NO: 200 | CGGTGTTTCCACAGTATCCATCACC | SEQ ID NO: 2566 | AAATCACATGCATTGTATCCAT | SEQ ID NO: 4932 |
| rs2295120 | CCCTCTGAGCACCAAAGTCAAAA | SEQ ID NO: 201 | CCCTCTGAGCACCAAAGTCAAAG | SEQ ID NO: 2567 | TGTGAATAAACTCTGGTAGAGGC | SEQ ID NO: 4933 |
| rs458679 | TCATCTCATGGTCCTCTTCGTGTG | SEQ ID NO: 202 | TCATCTCATGGTCCTCTTCGTGTC | SEQ ID NO: 2568 | CTCTCATGATTTGTCATTGGAT | SEQ ID NO: 4934 |
| rs763028 | TTTTGCATCCTCTGATTCAGTCAAT | SEQ ID NO: 203 | TTTTGCATCCTCTGATTCAGTCAAC | SEQ ID NO: 2569 | ATGGATTGAAAATATTTGGAAAA | SEQ ID NO: 4935 |
| rs1360 | CCCCCAAACAATTCCACCATGT | SEQ ID NO: 204 | CCCCCAAACAATTCCACCATGC | SEQ ID NO: 2570 | TACTTATATAGCACTCACCAAACC | SEQ ID NO: 4936 |
| rs2734574 | AGAAGGGAGTGGCTGGTCCCT | SEQ ID NO: 205 | AGAAGGGAGTGGCTGGTCCCA | SEQ ID NO: 2571 | TTTTGATCATCTAGGAACAGGA | SEQ ID NO: 4937 |
| rs1548515 | CTTGCCAGGAGGAACCGTCAA | SEQ ID NO: 206 | CTTGCCAGGAGGAACCGTCAC | SEQ ID NO: 2572 | AGGACACACACTCATAAAGCTT | SEQ ID NO: 4938 |
| rs1610736 | TCATCATGACCATTCTGCTCACCA | SEQ ID NO: 207 | TCATCATGACCATTCTGCTCACCG | SEQ ID NO: 2573 | CATCATCCTAGTGTTGATCTTCC | SEQ ID NO: 4939 |
| rs1573648 | CTCATCTGCCTCTGGGCAGACA | SEQ ID NO: 208 | CTCATCTGCCTCTGGGCAGACG | SEQ ID NO: 2574 | TTTTCTGTGAAGATTCTCACTCC | SEQ ID NO: 4940 |
| rs3807035 | GCCTGTTTTCTTTGAGCATGTCCA | SEQ ID NO: 209 | GCCTGTTTTCTTTGAGCATGTCCG | SEQ ID NO: 2575 | CTGTTCCTAAATAATACTGGACATT | SEQ ID NO: 4941 |
| rs3763354 | ATTTGATGCCTTGGCCATCGACT | SEQ ID NO: 210 | ATTTGATGCCTTGGCCATCGACC | SEQ ID NO: 2576 | GAAAAAAGTCACTGAAGTGAACTT | SEQ ID NO: 4942 |
| rs2855437 | CAGGAGGGCCCTGGGTAAGAA | SEQ ID NO: 211 | CAGGAGGGCCCTGGGTAAGAG | SEQ ID NO: 2577 | AGAGAGTCAGAGACACCAAAAC | SEQ ID NO: 4943 |
| rs3117008 | GGAATACACCTTGCATGACAGGAAAT | SEQ ID NO: 212 | GGAATACACCTTGCATGACAGGAAAC | SEQ ID NO: 2578 | GAGAAACAGTCACTCTCTCAATTC | SEQ ID NO: 4944 |
| rs3823342 | CCCAACACACATTAGGTCCTCCAA | SEQ ID NO: 213 | CCCAACACACATTTAGGTCCTCCAG | SEQ ID NO: 2579 | CTCTCACCTTTACAAGCTGTGA | SEQ ID NO: 4945 |
| rs2254618 | TTGAGGGGTGCATAAACGTAAGACT | SEQ ID NO: 214 | TTGAGGGGTGGATTAACGTAAGACA | SEQ ID NO: 2580 | GTTGATGCCTGATATAGATTGG | SEQ ID NO: 4946 |
| rs1541270 | CACAGAGCTCCTAAAACCCTTGAAA | SEQ ID NO: 215 | CACAGAGCTCCTAAAACCCTTGAAC | SEQ ID NO: 2581 | GATGATCCTAAACTAATGATGGG | SEQ ID NO: 4947 |
| rs3817962 | GGGAAACTCAAAGGGGCTCAGA | SEQ ID NO: 216 | GGGAAACTCAAAGGGGCTCAGC | SEQ ID NO: 2582 | ATCGGCTGGTTATGTTTTAAAC | SEQ ID NO: 4948 |
| rs3763313 | TTACAGTTTCCCCCTTTCCAAGAAA | SEQ ID NO: 217 | TTACAGTTTCCCCCTTTCCAAGAAC | SEQ ID NO: 2583 | TACTGCTAGTAAGATTTTATGGGA | SEQ ID NO: 4949 |
| rs1611651 | CAGCCCACTGAACTACACATAATGGT | SEQ ID NO: 218 | CAGCCCACTGAACTACACATTATGGC | SEQ ID NO: 2584 | GTCACGAGAGAAGTTTTGATAGTT | SEQ ID NO: 4950 |
| rs2516713 | TGAGTTTTGGTTCTCCCAACCTTCT | SEQ ID NO: 219 | TGAGTTTTGGTTCTCCCAACCTTCA | SEQ ID NO: 2585 | CCTGGATACTTGTGACATAATCC | SEQ ID NO: 4951 |
| rs3869070 | CCTTTCTCAAACTCATGTTTTTGGCA | SEQ ID NO: 220 | CCTTTCTCAAACTCATGTTTTTGGCG | SEQ ID NO: 2586 | TCATTGATAAATCAGAAAGCAAA | SEQ ID NO: 4952 |
| rs7743412 | CATGTGCTGGGTTGTCCAGCA | SEQ ID NO: 221 | CATGTGCTGGGTTGTCCAGCG | SEQ ID NO: 2587 | GTCCTCAGTCTCTGTGTGTAGC | SEQ ID NO: 4953 |
| rs1541267 | GCTGGAACATCAAATGCCCACT | SEQ ID NO: 222 | GCTGGAACATCAAATGCCCACC | SEQ ID NO: 2588 | CATTGTCTAAGTTCCCTCCAGT | SEQ ID NO: 4954 |
| rs2853977 | GATGGTCCAGTCCCTGACCCT | SEQ ID NO: 223 | GATGGTCCAGTCCCTGACCCA | SEQ ID NO: 2589 | TGTCTTTATCCAGTGGCTCTAA | SEQ ID NO: 4955 |
| rs3891156 | AGCATCTCCACCCTCCCCTAGAA | SEQ ID NO: 224 | AGCATCTCCACCCTCCCCTAGAG | SEQ ID NO: 2590 | TCTCAGAATGTCCAGTGACTGT | SEQ ID NO: 4956 |
| rs2394607 | TGCAATCACTATCAAAATCCCAAAA | SEQ ID NO: 22S | TGCAATCACTATCAAAATCCCAAAG | SEQ ID NO: 2591 | CATTTTTTACAGAAATGGAAAAA | SEQ ID NO: 4957 |
| rs1028411 | AACCACTCGTATCTCTCCACCCTT | SEQ ID NO: 226 | AACCACTCGTATCTCTCCACCCTG | SEQ ID NO: 2592 | GTCATGAAAGATGATGACTTTAAA | SEQ ID NO: 4958 |
| rs2022065 | GGTCTTCTGACTTCAAATCCAGTGCT | SEQ ID NO: 227 | GGTCTTCTGACTTCAAATCCAGTGCC | SEQ ID NO: 2593 | TTTCTATGCAGCTACTTCTGTG | SEQ ID NO: 4959 |
| rs2294748 | CCTGCAGTGAGTAGAGCCAAGTTTT | SEQ ID NO: 228 | CCTGCAGTGAGTAGAGCCAAGTTTC | SEQ ID NO: 2594 | TGACTTTTTCTGACCACATTAAT | SEQ ID NO: 4960 |
| rs6933541 | CGCCCCTGCCCATTTTTAGT | SEQ ID NO: 229 | CGCCCCTGCCCATTTTTAGC | SEQ ID NO: 2595 | CTTTGGTCGTATACTAAGAACCTC | SEQ ID NO: 4961 |
| rs1419638 | GGAACACAGAAATGGAATGGAGGAAA | SEQ ID NO: 230 | GGAACACAGAAATGGAATGGAGGTAG | SEQ ID NO: 2596 | AAGGTAGTACAGGAGAGGAAAAT | SEQ ID NO: 4962 |
| rs13395 | GCACCTGCATGTGTCTGTGTTCT | SEQ ID NO: 231 | GCACCTGCATGTGTCTGTGTTCA | SEQ ID NO: 2597 | GTAGGCATAATGTGAGGAGGT | SEQ ID NO: 4963 |
| rs64036 | GAGGGATTGTCTGAAGAGAAGCTGT | SEQ ID NO: 232 | GAGGGATTGTCTGAAGAGAAGCTGG | SEQ ID NO: 2598 | TATCTGGCTTCTGTGTTCTTTT | SEQ ID NO: 4964 |
| rs727939 | GGTTGTCCTCTAGAACACCCACACA | SEQ ID NO: 233 | GGTTGTCCTCTAGAACACCCACACG | SEQ ID NO: 2599 | TTTCCTCCAAGTTATATGCTGA | SEQ ID NO: 4965 |
| rs10751 | CCAGGAATGAGGTCCCCCAAA | SEQ ID NO: 234 | CCAGGAATGAGGTCCCCCAAG | SEQ ID NO: 2600 | TGCTAAGTTTTACATAGGGGAG | SEQ ID NO: 4966 |
| rs3869065 | AGCGTGGTCTTGGATGGCAGG | SEQ ID NO: 235 | AGCGTGGTCTTGGATGGCAGC | SEQ ID NO: 2601 | AGACAGGTAGGTTTCTGCACTTA | SEQ ID NO: 4967 |
| rs3094061 | TGAACAAACCAACATTCAGGCTCA | SEQ ID NO: 236 | TGAACAAACCAACATTCAGGCTCC | SEQ ID NO: 2602 | TTGGAGTATGCTTTTAGGCTTT | SEQ ID NO: 4968 |
| rs419434 | TCTCCAACTATGTGGCTTGCCCA | SEQ ID NO: 237 | TCTCCAACTATGTGGCTTGCCCG | SEQ ID NO: 2603 | CTACCAGACCCTTCTTGAGAAAT | SEQ ID NO: 4969 |
| rs429916 | CAGGTGTCTCCTAGGCGCCTATT | SEQ ID NO: 238 | CAGGTGTCTCCTAGGCGCCTATG | SEQ ID NO: 2604 | TGTGCTAGGCATTACGTAGAC | SEQ ID NO: 4970 |
| rs3130603 | ATGCAAATTCCCACATCTGAAAGT | SEQ ID NO: 239 | ATGCAAATTCCCACATCTGAAAGG | SEQ ID NO: 2605 | TTTGGAAGAAGAATTCTAATCAGA | SEQ ID NO: 4971 |
| rs397144 | CCCAGGGTAACCTACCTCCCTCA | SEQ ID NO: 240 | CCCAGGGTAACCTACCTCCCTCG | SEQ ID NO: 2606 | CATATCGTCTGACAGGTGTGT | SEQ ID NO: 4972 |
| rs3873332 | TTTTTCCCTCCCCTGCATTCAT | SEQ ID NO: 241 | TTTTTCCCTCCCCTGCATTCAC | SEQ ID NO: 2607 | ACATTCAAACATAGTATATCGTTCA | SEQ ID NO: 4973 |
| rs2735052 | GCATTGACTTCATTGCTCAGCTAAAT | SEQ ID NO: 242 | GCATTGACTTCATTGCTCAGCTAAAC | SEQ ID NO: 2608 | CTGTAACCAAAGGATGAGTCAT | SEQ ID NO: 4974 |
| rs3134759 | GACCCTGGTTGGGAGGTCTTGTA | SEQ ID NO: 243 | GACCCTGGTTGGGAGGTCTTGTC | SEQ ID NO: 2609 | AGTCACGAGGAATAGGATCAG | SEQ ID NO: 4975 |
| rs2571430 | TGCACCTGTGCTTTTATTTCAGGA | SEQ ID NO: 244 | TGCACCTGTGCTTTTATTTCAGGG | SEQ ID NO: 2610 | CTGAGACAATTGTATTTATCAGATG | SEQ ID NO: 4976 |
| rs4713367 | GAGATGGGGATCCCTGATTTGTAGT | SEQ ID NO: 245 | GAGATGGGGATCCCTGATTTGTAGC | SEQ ID NO: 2611 | GTTATCCGTGTGTAGTTATTCCG | SEQ ID NO: 4977 |
| rs2523774 | GGAAGCCAGTCACAGGAGGCTACA | SEQ ID NO: 246 | GGAAGCCAGTCACAGGAGGCTACG | SEQ ID NO: 2612 | AACTTATGAGCCCATTTTTGT | SEQ ID NO: 4978 |
| rs2233969 | ACAGGCTGGGCTAGTGGTTGTGA | SEQ ID NO: 247 | ACAGGCTGGGCTAGTGGTTGTGG | SEQ ID NO: 2613 | GAGAATAAACCTCCACATTCC | SEQ ID NO: 4979 |
| rs522162 | GGAACAGGCACTGGCCATGTT | SEQ ID NO: 248 | GGAACAGGCACTGGCCATGTC | SEQ ID NO: 2614 | TTACACTGAGATCAAACCTGAC | SEQ ID NO: 4980 |
| rs3763324 | TCATTTGAGGATTCAGGTCAATGAAT | SEQ ID NO: 249 | TCATTTGAGGATTCAGGTCAATGAAC | SEQ ID NO: 2615 | TGAGAGAGTATAATGGGCAAAG | SEQ ID NO: 4981 |
| rs1033568 | GGAGAACGAAGACATCTTGGCAT | SEQ ID NO: 250 | GGAGAACGPAGACATCTTGGCAC | SEQ ID NO: 2616 | TTCATCTGCTTGGTACAGATC | SEQ ID NO: 4982 |
| rs1632984 | TGAGGAAAGGACTCTTGGCTGAGA | SEQ ID NO: 251 | TGAGGAAAGGACTCTTGGCTGAGT | SEQ ID NO: 2617 | GATCCTGGATACCTTGAGAATG | SEQ ID NO: 4983 |
| rs1362060 | TTGACAAGGCATGTCCATAAGACTCA | SEQ ID NO: 252 | TTGACAAGGTATGTCCATAAGACTCG | SEQ ID NO: 2618 | AGTGACCTCTGTGTCTAACATAGA | SEQ ID NO: 4984 |
| rs7754443 | CAGACAGTGCTTCAGAGGGCACT | SEQ ID NO: 253 | CAGACAGTGCTTCAGAGGGCACC | SEQ ID NO: 2619 | TGCTCCACTTGGTCTTAATTT | SEQ ID NO: 4985 |
| rs2395351 | TGGTGATAGTGGCATCGATGACTA | SEQ ID NO: 254 | TGGTGATAGTGGCATCGATGACTG | SEQ ID NO: 2620 | AGTTTTGGTAAATCTCTAAAAATTG | SEQ ID NO: 4986 |
| rs2267644 | GAATGCCAGTCAGAATGCAAAATTA | SEQ ID NO: 255 | GAATGCCAGTCAGAATGCAAAATTG | SEQ ID NO: 2621 | AGTCAATAAAATCACAAAAGAGAA | SEQ ID NO: 4987 |
| rs29232 | ATCCCCCACCACCCATGAGT | SEQ ID NO: 256 | ATCCCCCACCACCCATGAGC | SEQ ID NO: 2622 | TTTTGATAGCATTGCAAGTATAAT | SEQ ID NO: 4988 |
| rs1633085 | AGGGAATCTGGTGTCCTTAGATCACT | SEQ ID NO: 257 | AGGGAATCTGGTGTCCTTAGATCACC | SEQ ID NO: 2623 | GAGTTAATAGTAGCAGGGAAGGA | SEQ ID NO: 4989 |
| rs7743506 | TCAAAGTTTAGGGGAACATCGAGATA | SEQ ID NO: 258 | TCAAAGTTTAGGGGAACATCGAGATC | SEQ ID NO: 2624 | GATTTTTCTAGTTGAAGCATAAGC | SEQ ID NO: 4990 |
| rs1737009 | CACAGACCTTTCAAGGACTCACCTT | SEQ ID NO: 259 | CACAGACCTTTCAAGGACTCACCTA | SEQ ID NO: 2625 | TTAGGACAGTCAAAGCAGGATA | SEQ ID NO: 4991 |
| rs2844606 | GCACATCAGTGATGAATGCAAGAGA | SEQ ID NO: 260 | GCACATCAGTGATGAATGCAAGAGG | SEQ ID NO: 2626 | GTTTCTATAAGAACTGGCATAAATC | SEQ ID NO: 4992 |
| rs2394173 | AAAGGGGAGCTGGTATGTGCAA | SEQ ID NO: 261 | AAAGGGGAGCTGGTATGTGCAG | SEQ ID NO: 2627 | AGTCACGTGGTAAGAGAGGAAC | SEQ ID NO: 4993 |
| rs4392759 | GCCAAACAAGTCTATGAGGTCACCTA | SEQ ID NO: 262 | GCCAAACAAGTCTATGAGGTCACCTG | SEQ ID NO: 2628 | CAAGGAAGACCTTATCAAAGAG | SEQ 10 NO: 4994 |
| rs3132528 | TTAAAACTAGGTAGGAAAGGGCGGA | SEQ ID NO: 263 | TTAAATCTAGGTAGGAAAGGGCGGG | SEQ ID NO: 2629 | GTGGCAGGTTTAAATAGAACAG | SEQ ID NO: 4995 |
| rs3130782 | TGCTCCATAAGGCTCTTTAGAAGCA | SEQ ID NO: 264 | TGCTCCATAAGGCTCTTTAGAAGCG | SEQ ID NO: 2630 | TCAACTTCCCCTATTTTACATCT | SEQ ID NO: 4996 |
| rs379221 | TTGTGAGCCAACAAATCTATGGCTA | SEQ ID NO: 265 | TTGTGAGCCAACPAATCTATGGCTG | SEQ ID NO: 2631 | GGAAACAGTCAACTCCATTTCT | SEQ ID NO: 4997 |
| rs7195 | GGGTGGCTATAGGGCTGGAAAAT | SEQ ID NO: 266 | GGGTGGCTATAGGGCTGGAAAAC | SEQ ID NO: 2632 | CTGAAGATGACTGCTTTCACT | SEQ ID NO: 4998 |
| rs7383433 | TCCTTGAAAACCAGAGTTCTTGGTA | SEQ ID NO: 267 | TCCTTGAAAACCAGAGTTCTTGGTG | SEQ ID NO: 2633 | AAAAGAAAGGAGATGCAGAAGTA | SEQ ID NO: 4999 |
| rs1632854 | AGTGGAGCTGACTGGTCCGAGAA | SEQ ID NO: 268 | AGTGGAGCTGACTGGTCCGAGAT | SEQ ID NO: 2634 | ATTTTTTTAAATGCCTCCTTG | SEQ ID NO: 5000 |
| rs5007259 | GCATTTCCCTAAAGGACATTGATTCT | SEQ ID NO: 269 | GCATTTCCCTAAAGGACATTGATTCC | SEQ ID NO: 2635 | TCCGTATGTCGTACTCTGTAATC | SEQ ID NO: 5001 |
| rs3130377 | AACAGGCAAAGGACTTCAAGACTA | SEQ ID NO: 270 | TTTCAGGCAAAGGACTTCAAGACTG | SEQ ID NO: 2636 | GGAATTCTTACAAGTTTTCCTTAG | SEQ ID NO: 5002 |
| rs1419632 | AAAGCATCACCATGGCCCAAA | SEQ ID NO: 271 | AAAGCATCACCATGGCCCAAC | SEQ ID NO: 2637 | GTTACAATGAGCATACAGAAGC | SEQ ID NO: 5003 |
| rs3619721 | TTCCCTTCACTTGTTTTCCTTTCTT | SEQ ID NO: 272 | TTCCCTTCACTTGCTTTCCTTTCTC | SEQ ID NO: 2638 | TTCTAGACATACTCAAACAAACAAA | SEQ ID NO: 5004 |
| rs2071363 | CAGATATTTTGTCACCTGCAGCAACA | SEQ ID NO: 273 | CAGATATTTTGTCACCTGCAGCAACG | SEQ ID NO: 2639 | ACACAGTTATTGTCATTCCTGG | SEQ ID NO: 5005 |
| rs2233966 | TCTCATAAGGATGGCATCCAGGT | SEQ ID NO: 274 | TCTCATAAGGATGGCATCCAGGC | SEQ ID NO: 2640 | CATTTCCCTAGCTAGATCCAG | SEQ ID NO: 5006 |
| rs2621416 | TTCCATATTGGTGTCATGACAATCAA | SEQ ID NO: 275 | TTCCATATTGGTGTCATGACAATCAG | SEQ ID NO: 2641 | TATATTTCAAAAACTTGTTTCCG | SEQ ID NO: 5007 |
| rs1736912 | TCTGTCCTTAGCCAGGGACCTTCT | SEQ ID NO: 276 | TCTGTCCTTAGCCAGGGACCTTCC | SEQ ID NO: 2642 | CTGACCTGTGATTACTGGGAT | SEQ ID NO: 5008 |
| rs3763347 | GAAATCTCCCCTCACTGCCAAAA | SEQ ID NO: 277 | GAAATCTCCCCTCACTGCCAAAT | SEQ ID NO: 2643 | AGCAGTGGCAAGTAGGAAGTAG | SEQ ID NO: 5009 |
| rs1610613 | CAGGGCAGCTGTGGTCCCTA | SEQ ID NO: 278 | CAGGGCAGCTGTGGTCCCTG | SEQ ID NO: 2644 | TTTCATCATATGTCCAAGTGTTAC | SEQ ID NO: 5010 |
| rs3135373 | CCATTCTTCTTCCACTCTTCACAGAT | SEQ ID NO: 279 | CCATTCTTCTTCCACTCTTCACAGAC | SEQ ID NO: 2645 | AGGCTACAGTCCACATCTTTAAC | SEQ ID NO: 5011 |
| rs2523946 | AGCAGCCACACTCCAAAAGAGGGT | SEQ ID NO: 280 | AGCAGTCACACTCCAAAAGAGGGC | SEQ ID NO: 2646 | CAGGTTAGAAAACCCTCACAG | SEQ ID NO: 5012 |
| rs3873374 | CCTAGACTGGGCTTTTAAACACTGGAA | SEQ ID NO: 281 | CCTAGACTGGGCTTTTTAACACTGGAG | SEQ ID NO: 2647 | GTGGATGTGATTTCTAGTTTCAG | SEQ ID NO: 5013 |
| rs17034 | AGTGTCCAAATCTCCATCGTGCT | SEQ ID NO: 282 | AGTGTCCAAATCTCCATCGTGCC | SEQ ID NO: 2648 | GCAACTCAGGAACAGCTATCT | SEQ ID NO: 5014 |
| rs2073149 | TCATTGCTGGTTATTTATGCCTCAGT | SEQ ID NO: 283 | TCATTGCTGGTTAAATGCCTCAGA | SEQ ID NO: 2649 | GAGTTCTCTGGTTAATTCAAATCA | SEQ ID NO: 5015 |
| rs2073150 | AACGCAGGATGGATATAGGTGAAA | SEQ ID NO: 284 | AACGCAGGATGGATATAGGTGAAG | SEQ ID NO: 2650 | GAACAGGTGCATAGAAAAGAATA | SEQ ID NO: 5016 |
| rs3117007 | GACATCTTCACGCACAGAAGGAGG | SEQ ID NO: 285 | GACATCTTCACGCACAGAAGGAGC | SEQ ID NO: 2651 | AGAAAGGTGAGAAATCCTGTG | SEQ ID NO: 5017 |
| rs3094207 | CCCCACCTTTTGCCTATGGAAGG | SEQ ID NO: 286 | CCCCACCTTTTGCCTATGGAAGC | SEQ ID NO: 2652 | ATGTGCTTTGAGCTTGATTTT | SEQ ID NO: 5018 |
| rs3748082 | CCTAGTTAAGTGGCAAGATGCCCAT | SEQ ID NO: 287 | CCTAGTAAAGTGGCAAGATGCCCAC | SEQ ID NO: 2653 | ACTTGTGGAAATGGGAATCTTA | SEQ ID NO: 5019 |
| rs423808 | GGCTGACTTCAGGGGTGGAGTAAA | SEQ ID NO: 288 | GGCTGACTTCAGGGGTGGAGTAAC | SEQ ID NO: 2654 | GGAGTCTCTCAGTTCCTTCTC | SEQ ID NO: 5020 |
| rs445150 | TGTGGATAAGGGGAACCACTGTATAT | SEQ ID NO: 289 | TGTGGATAAGGGGAACCACTGTATAC | SEQ ID NO: 2655 | CAGATCTTTGTGAAGAATACTGC | SEQ ID NO: 5021 |
| rs3734841 | TGGGTTTTTGTTGATCTGAGGAACTT | SEQ ID NO: 290 | TGGGTTTTTGTTGATCTGAGGAACTC | SEQ ID NO: 2656 | TACCAACCTTACTCATCAGTGC | SEQ ID NO: 5022 |
| rs3132523 | CCAAAACAGAATTTGGAAAATCCAA | SEQ ID NO: 291 | CCAAAACAGAATTTGGAAAATCCAG | SEQ ID NO: 2657 | ATAGCAGAGGGCATTTATCAGT | SEQ ID NO: 5023 |
| rs3997854 | TGCTGATGGAAAGACAACTTTGTTT | SEQ ID NO: 292 | TGCTGATGGAAAGACAACTTTGTTG | SEQ ID NO: 2658 | TATTGTTGTGGCTTGTATGTCTT | SEQ ID NO: 5024 |
| rs2071482 | GCCCAGCACCATCTGTGTGATT | SEQ ID NO: 293 | GCCCAGCACCATCTGTGTGATG | SEQ ID NO: 2659 | CCTTCCATTCTTAACCCTTCT | SEQ ID NO: 5025 |
| rs2071469 | AATCGTCAGCCTCTTCAGAATGAGT | SEQ ID NO: 294 | AATCGTCAGCCTCTTCAGAATGAGC | SEQ ID NO: 2660 | CATAAAATTCAGTCAGAAAGTACC | SEQ ID NO: 5026 |
| rs2736155 | CCTAGGGGACAGGCATGTGTTAAAC | SEQ ID NO: 295 | CCTAGGGGACAGGCATGTGTTAAAG | SEQ ID NO: 2661 | GTGAGTCACAGTGAGAGGTCAG | SEQ ID NO: 5027 |
| rs2524198 | GCTCCCGTGTCGGTGTCTCT | SEQ ID NO: 296 | GCTCCCGTGTCGGTGTCTCC | SEQ ID NO: 2662 | AATCCTGGAGTACAGATGTTTC | SEQ ID NO: 5028 |
| rs560505 | CATGGATGAAGAACTTGCAAAAAAAT | SEQ ID NO: 297 | CATGGATGAAGAACTTGCAAAAAAAC | SEQ ID NO: 2663 | TTGTTCCAAAATCCAGATTCTA | SEQ ID NO: 5029 |
| rs2894252 | AAGAAAATGTCTATGGCAAAGGGCT | SEQ ID NO: 298 | AAGAAAATGTCTATGGCAAAGGGCC | SEQ ID NO: 2664 | AAGATTAGAATCTACTACGCTCAGC | SEQ ID NO: 5030 |
| rs3094220 | TCTGAGAGTCTGGGTGGTGCTCT | SEQ ID NO: 299 | TCTGAGAGTCTGGGTGGTGCTCC | SEQ ID NO: 2665 | CCTACGCCTCTAGAGGTCTCT | SEQ ID NO: 5031 |
| rs3763355 | TGTTAAGAATGAACCCAGGGTATCAT | SEQ ID NO: 300 | TGTTAAGAATGAACCCAGGGTATCC | SEQ ID NO: 2666 | GTAACCACAAGTTCACTTCAGTG | SEQ ID NO: 5032 |
| rs3823312 | GAGCATCCAGTGGCACACTGTAGA | SEQ ID NO: 301 | GAGCATCCAGTGGCAGACTGTAGG | SEQ ID NO: 2667 | GTTTAGTAACTGCTGGCATTCC | SEQ ID NO: 5033 |
| rs4999342 | GTAAGAACCATGGGTGTGAACCATT | SEQ ID NO: 302 | GTAAGAACCATGGGTGTGAACCATC | SEQ ID NO: 2668 | GAAAAAATCTGTGTTGAACAAG | SEQ ID NO: 5034 |
| rs2517403 | CTCATGGAGTAACAAAACCAACACCA | SEQ ID NO: 303 | CTCATGGAGTTACAAAACCAACACCG | SEQ ID NO: 2669 | AATCAATTTCAGAACATTTTCATC | SEQ ID NO: 5035 |
| rs4987086 | TCCAGGTATGGAATACAGGGGACA | SEQ ID NO: 304 | TCCAGGTATGGAATACAGGGGACG | SEQ ID NO: 2670 | TTAAGAAGATATGGCCACACA | SEQ ID NO: 5036 |
| rs3819294 | GGGACTGGGAGGAAGCAGGA | SEQ ID NO: 305 | GGGACTGGGAGGAAGCAGGG | SEQ ID NO: 2671 | CATGAGATCTTAGAGGAACCTC | SEQ ID NO: 5037 |
| rs909728 | TCATGGACTGTTCATCGTGTAGTGA | SEQ ID NO: 306 | TCATGGACTGTTCATCGTGTAGTGG | SEQ ID NO: 2672 | GGATGGTACAAGATGGTAGATG | SEQ ID NO: 5038 |
| rs2294477 | GGAGATGGTCTGGCATCTGTGAG | SEQ ID NO: 307 | GGAGATGGTCTGGCATCTGTGAC | SEQ ID NO: 2673 | GTTTATTCACACTGTGAGGGG | SEQ ID NO: 5039 |
| rs3117229 | CAAGCAGGAAAGAGAATGACTCTGAT | SEQ ID NO: 308 | CAAGCAGGAAAGAGAATGACTCTGAC | SEQ ID NO: 2674 | GGATATGGTTTGTAATTTGTAATG | SEQ ID NO: 5040 |
| rs3909178 | TTAAGGTTGCTATTCGGCTGACTTT | SEQ ID NO: 309 | TTAAGGTTGCTATTCGGCTGACTTC | SEQ ID NO: 2675 | CAGAGATTATCATGGATTATTCAG | SEQ ID NO: 5041 |
| rs3116985 | AGGGTAACCTCCTTTTGTTGGAACA | SEQ ID NO: 310 | AGGGTTACCTCCTTTTGTTGGAACG | SEQ ID NO: 2676 | TCTGTTTATAGGAGAAAAAAACAA | SEQ ID NO: 5042 |
| rs3095320 | TCCTGAGCCCCAGTTTCTGAAAT | SEQ ID NO: 311 | TCCTGAGCCCCAGTTTCTGAAAC | SEQ ID NO: 2677 | CTGAAGTGGGGTTAATGACAC | SEQ ID NO: 5043 |
| rs241445 | CCCAAGAAGGCACAGACTGTTTCT | SEQ ID NO: 312 | CCCAAGAAGGCACAGACTGTTTCC | SEQ ID NO: 2678 | CTAGTAGGTCCTTCGTCCTCC | SEQ ID NO: 5044 |
| rs3a28896 | CCTGGAGGGTTCATAGTCTAATGGGA | SEQ ID NO: 313 | CCTGGAGGGTTCATAGTCTAATGGGG | SEQ ID NO: 2679 | AGGAGGGTAGAAGATGGTAGGT | SEQ ID NO: 5045 |
| rs6914995 | CGAGCTATGGACTCTGCATTAGGAGAC | SEQ ID NO: 314 | CGAGCTATGGACTCTGCATTAGGAGAG | SEQ ID NO: 2680 | AAGTGCAAAGAGTGTTTCTGTAT | SEQ ID NO: 5046 |
| rs3815086 | CTCTGCTGCCTGGTCCTCACTA | SEQ ID NO: 315 | CTCTGCTGCCTGGTCCTCACTG | SEQ ID NO: 2681 | GATGAGTGACAAGATAGAGCCC | SEQ ID NO: 5047 |
| rs3132708 | GGGAGACCAGGGACTCCTCTGATA | SEQ ID NO: 316 | GGGAGACCAGGGACTCCTCTGATG | SEQ ID NO: 2682 | CCAACTGTAGCTCAAGGACTC | SEQ ID NO: 5048 |
| rs6457644 | GATGTGAGATCTGAGACTGAACCCAT | SEQ ID NO: 317 | GATGTGAGATCTGAGACTGAACCCAC | SEQ ID NO: 2683 | ACTTCCCTTCTAAGATACAATTCTG | SEQ ID NO: 5049 |
| rs6914849 | AGAGCCCTAGGGTCCTAGAAGAGAGA | SEQ ID NO: 318 | AGAGCCCTAGGGTCCTAGAAGAGAGG | SEQ ID NO: 2684 | AGGATACAGAAACACTCTTTGC | SEQ ID NO: 5050 |
| rs4151655 | GACAGGACCATGAGGGTAGGAGATA | SEQ ID NO: 319 | GACAGGACCATGAGGGTAGGAGATT | SEQ ID NO: 2685 | GGAAGATAAACTGGCTAAAGG | SEQ ID NO: 5051 |
| rs6457327 | TGAGTCTCTCTGTCCACTGTGACATTT | SEQ ID NO: 320 | TGAGTGTCTCTGTCCACTGTGACATTG | SEQ ID NO: 2686 | CATATGATGAATTCAGGAGAACT | SEQ ID NO: 5052 |
| rs2647087 | GCCTCAAGGGAAGCCCCAGT | SEQ ID NO: 321 | GCCTCAAGGGAAGCCCCAGG | SEQ ID NO: 2687 | GTGCAGAATCACATGACAATACT | SEQ ID NO: 5053 |
| rs3830060 | CCTGCTGTGTCTTTGGAGAAATTCA | SEQ ID NO: 322 | CCTGCTGTGTCTTTGGAGTAATTCG | SEQ ID NO: 2688 | ATCTTCAAAAATAACCCCATG | SEQ ID NO: 5054 |
| rs915653 | TCTATCCCCATCCTCTCCAGATAGTT | SEQ ID NO: 323 | TCTATCCCCATCCTCTCCAGATAGTC | SEQ ID NO: 2689 | CCTAACCAAGTGAAGTAGGTTAAG | SEQ ID NO: 5055 |
| rs2524059 | CAGACACCCCTTGTCTCTTGGGTG | SEQ ID NO: 324 | CAGACACCCCTTGTCTCTTGGGTC | SEQ ID NO: 2690 | GGACACTGGGTAAAGTGGAATA | SEQ ID NO: 5056 |
| rs6912673 | TGATAAAAGGCACCTACAAAAACCCTA | SEQ ID NO: 325 | TGATAAAAGGCACCTACAAAAACCCTG | SEQ ID NO: 2691 | AGTTGATGTTTACTGGACGTTATT | SEQ ID NO: 5057 |
| rs4713218 | TGGGGAGAAACATTTGACATCTTTT | SEQ ID NO: 326 | TGGGGAGAAACATTTGACATCTC | SEQ ID NO: 2692 | ATGTCTTTTGCATTTTGAATCA | SEQ ID NO: 5058 |
| rs3135372 | TTGGATTTAGGGAAAAGGAAATGCA | SEQ ID NO: 327 | TTGGATTTAGGGAAAAGGAAATGCC | SEQ ID NO: 2693 | TGGCATGTTAATATGCTGATT | SEQ ID NO: 5059 |
| rs3807034 | ATGGAAAGGCGAGAGGCACCA | SEQ ID NO: 328 | ATGGAAAGGCGAGAGGCACCG | SEQ ID NO: 2694 | GAATGAAAACCACACATCAAC | SEQ ID NO: 5060 |
| rs2158285 | TCTCACCGGTACAAACCCTAAAAGTT | SEQ ID NO: 329 | TCTCACCGGTACAAACCCTAAAAGTC | SEQ ID NO: 2695 | GTTTTCAGGAACAAATAGCTCTG | SEQ ID NO: 5061 |
| rs2735061 | GTGGGCTCTGACCAGGTCCTA | SEQ ID NO: 330 | GTGGGCTCTGACCAGGTCCTG | SEQ ID NO: 2696 | TTTTGTTCTACCCCAATCACT | SEQ ID NO: 5062 |
| rs204995 | CACACAGGGTTCCCAGGGCTT | SEQ ID NO: 331 | CACACAGGGTTCCCAGGGCTC | SEQ ID NO: 2697 | CTCTGTTTTCTGTACTCTGTCTCTC | SEQ ID NO: 5063 |
| rs2596501 | ACATTTGTCTGTGAAATTGGACCCA | SEQ ID NO: 332 | ACAAAGTCTGTGAAATTGGACCCG | SEQ ID NO: 2698 | CATCAAGGACTGTTCTTTCCT | SEQ ID NO: 5064 |
| rs2256902 | ACATATGCAAAGGGACAAGAATGAA | SEQ ID NO: 333 | ACATATGCAAAGGGACAAGAATGAG | SEQ ID NO: 2699 | ATTTCAGATACAAGGAAAACTGG | SEQ ID NO: 5065 |
| rs2844586 | GGTAAACTTTTGAGCACCCTGGCTA | SEQ ID NO: 334 | GGTTAACTTTTGAGCACCCTGGCTG | SEQ ID NO: 2700 | GGGTGTCCATTAAAATGATTG | SEQ ID NO: 5066 |
| rs2293861 | GAGGCTTCCCAATAAGCTGCAGA | SEQ ID NO: 335 | GAGGCTTCCCAATAAGCTGCAGG | SEQ ID NO: 2701 | TATTAAAGGGTAGGGAGCAGG | SEQ ID NO: 5067 |
| rs1233408 | GCACAGATGCAAGTAGGTGAACAGA | SEQ ID NO: 336 | GCACAGATGCAAGTAGGTGAACAGG | SEQ ID NO: 2702 | GGGTAAGTAAGAACTTCTCTTTTT | SEQ ID NO: 5068 |
| rs7382794 | GAGTCTCCCTAGTGTAACCTTGACCCA | SEQ ID NO: 337 | GAGTCTCCCTAGTGTAACCTTGACCCG | SEQ ID NO: 2703 | AATAACAGCAGTGTCTTTATCCC | SEQ ID NO: 5069 |
| rs3830061 | GAGTCAGTGCAGGAGCCCTGA | SEQ ID NO: 338 | GAGTCAGTGCAGGAGCCCTGG | SEQ ID NO: 2704 | GAAGAGAGAAGAGGGATGATCA | SEQ ID NO: 5070 |
| rs2524074 | AGGCCCATTGCACAGGACAGTT | SEQ ID NO: 339 | AGGGCCATTGCACAGGACAGTC | SEQ ID NO: 2705 | TACTTTCCCACTTGAAAAGTG | SEQ ID NO: 5071 |
| rs3131025 | ACAAACAGGCATTTTGCACTATTCTT | SEQ ID NO: 340 | ACAAACAGGCATTTTGCACTATTCTC | SEQ ID NO: 2706 | CTTCTCTACCAGTCAGTATGGTG | SEQ ID NO: 5072 |
| rs1034324 | GTCCTAACTCCAAGGCAAGGGTT | SEQ ID NO: 341 | GTCCTTACTCCAAGGCAAGGGTC | SEQ ID NO: 2707 | TCACTCATAGTGCTTCACCAC | SEQ ID NO: 5073 |
| rs3130655 | AGAGGGAGGGGCCAGGAGGTT | SEQ ID NO: 342 | AGAGGGAGGGGCCAGGAGGTA | SEQ ID NO: 2708 | CATTGCACTAGAATTACTGTGAGA | SEQ ID NO: 5074 |
| rs4713324 | CATTGGTCAGGAAAAGAGAAACAGAGA | SEQ ID NO: 343 | CATTGGTCAGGAAAAGAGAAACAGAGG | SEQ ID NO: 2709 | AGAAAAACTGAGCAAATAACATG | SEQ ID NO: 5075 |
| rs3129888 | TGAGTTAGGTGTGGTCAGAGGAAGACA | SEQ ID NO: 344 | TGAGTTAGGTGTGGTCAGAGGAAGACG | SEQ ID NO: 2710 | ATATGGAGATATCTGAGGGAGG | SEQ ID NO: 5076 |
| rs2071366 | CCCACCCTATCCTGTAGTTAGGGAAA | SEQ ID NO: 345 | CCCACCCTATCCTGTAGTTAGGGAAG | SEQ ID NO: 2711 | ACCCAGGACTGAATCAATATC | SEQ ID NO: 5077 |
| rs2074479 | TCTGTGTAGATTTGAAGTCCCAACAT | SEQ ID NO: 346 | TCTGTGTAGATTTGAAGTCCCAACAC | SEQ ID NO: 2712 | CAAGTCATCTAATTCAGAGGATG | SEQ ID NO: 5078 |
| rs2516312 | TGACTGTCCAGCATCATCTCTGAGTA | SEQ ID NO: 347 | TGACTGTCCAGCATCATCTCTGAGTG | SEQ ID NO: 2713 | GGGGACCAAAAAATTTATCTT | SEQ ID NO: 5079 |
| rs1737078 | GCTCCTTCGTGCCTAGCAATGTT | SEQ ID NO: 348 | GCTCCTTCGTGCCTAGCAATGTG | SEQ ID NO: 2714 | TAGCTTTACCCCAGCCTTAAC | SEQ ID NO: 5080 |
| rs3734854 | GCTCCACCCTCAAGCACTTGGA | SEQ ID NO: 349 | GCTCCACCCTCAAGCACTTGGG | SEQ ID NO: 2715 | ACTGATCCTTTGGGAAGGATG | SEQ ID NO: 5081 |
| rs6901541 | GAGATCGATCGAAGACTGTGAAAGTT | SEQ ID NO: 350 | GAGATCGATCGAAGACTGTGAAAGTC | SEQ ID NO: 2716 | GCTGTTCATAGAACAACTCTTTTT | SEQ ID NO: 5082 |
| rs3916766 | CAGCTTTGTTGTTGAAGGATGTTTTA | SEQ ID NO: 351 | CAGCAAGTTGTTGAAGGATGTTTTT | SEQ ID NO: 2717 | TGATTTTAGAATTCTAGGTTTGTG | SEQ ID NO: 5083 |
| rs6919972 | TGGGAACACACTGGCCCATTATATAA | SEQ ID NO: 352 | TGGGAACACACTGGCCCATTATATAG | SEQ ID NO: 2718 | GAAAAATAAAACATGATCCCC | SEQ ID NO: 5084 |
| rs6911639 | AATCATCGATTTCATGGTCTTTGACA | SEQ ID NO: 353 | AATCATCGATTTCATGGTCTTTGACG | SEQ ID NO: 2719 | ATGGCCTAATTTGGTTAGATTT | SEQ ID NO: 5085 |
| rs6921314 | TCCTGCACACTTCAGCACAAAACT | SEQ ID NO: 354 | TCCTGCACACTACAGCACAAAACC | SEQ ID NO: 2720 | TATATTTCTCTTCAGGAACAATAACC | SEQ ID NO: 5086 |
| rs3135351 | TCGGGTTTTTCATTGAAAGTCATT | SEQ ID NO: 355 | TCGGGTTTTTCATTGAAAGTCATG | SEQ ID NO: 2721 | AGGACTATGCTCTAGAAATGGG | SEQ ID NO: 5087 |
| rs3129299 | TCACAGCAGTGGGAATCAAAGTGA | SEQ ID NO: 356 | TCACAGCAGTGGGAATCAAAGTGG | SEQ ID NO: 2722 | AGGATCCCAGAGAAAGGAAGTA | SEQ ID NO: 5088 |
| rs7745235 | CCTCCACAAGACCCACCCTGA | SEQ ID NO: 357 | CCTCCACAAGACCCACCCTGG | SEQ ID NO: 2723 | GCACAATATTGCTTCTGGTTT | SEQ ID NO: 5089 |
| rs3819285 | CTGGGACCCTGTGTGCCAGA | SEQ ID NO: 358 | CTGGGACCCTGTGTGCCAGC | SEQ ID NO: 2724 | CTTACTCTTTTGTGCAGCACAT | SEQ ID NO: 5090 |
| rs1233493 | CTCCAGTAGGTCATTCAGATCTCCAT | SEQ ID NO: 359 | CTCCAGTAGGTCATTCAGATCTCCAC | SEQ ID NO: 2725 | TCCTACTAAGAAACTCCCCTCAT | SEQ ID NO: 5091 |
| rs2066744 | GCTGCAGAACAAATTCGAAAGTAAAAA | SEQ ID NO: 360 | GCTGCAGAACAAATTCGAAAGTTAAAG | SEQ ID NO: 2726 | CGTTCAAGTCTGAATCTTCATT | SEQ ID NO: 5092 |
| rs1367728 | CTAGAAAGGGGTTGCAGGGTTGT | SEQ ID NO: 361 | CTAGAAAGGGGTTGCAGGGTTGC | SEQ ID NO: 2727 | GGAGATGCAGCTCCTAAAAAAT | SEQ ID NO: 5093 |
| rs2853960 | GCAGTGCTCCAAGACAAGAAATTAATT | SEQ ID NO: 362 | GCAGTGCTCCAAGACAAGAAATTTATC | SEQ ID NO: 2728 | AGTATCTGGTAGGGATTCAGAGT | SEQ ID NO: 5094 |
| rs4151672 | GGTTTCCTGCTGGACAGGGGT | SEQ ID NO: 363 | GGTTTCCTGCTGGACAGGGGC | SEQ ID NO: 2729 | TGGGATTGAATTAAAACAGCT | SEQ ID NO: 5095 |
| rs3691157 | GCTCAGGAGAGAGAAGGGAGGAATTA | SEQ ID NO: 364 | GCTCAGGAGAGAGAAGGGAGGAAAC | SEQ ID NO: 2730 | CTGAAGATTTTGTGTTATTCATG | SEQ ID NO: 5096 |
| rs2394255 | CGACTGGGCTGCAGCCCTAT | SEQ ID NO: 365 | CGACTGGGCTGCAGCCCTAC | SEQ ID NO: 2731 | TACAGGTGTCCTTCTTTATACCTG | SEQ ID NO: 5097 |
| rs3128967 | CAGAGTCATTCTCTTTCCTGCTTGTCT | SEQ ID NO: 366 | CAGAGTCATTCTCTTTCGTGCTTGTCG | SEQ ID NO: 2732 | CTGTACTCATGTTACAGGTTAGGG | SEQ ID NO: 5098 |
| rs3130106 | GCAGCCATTCACACTATACATTTTTGT | SEQ ID NO: 367 | GCAGCCATTCACACTATACATTTTTGC | SEQ ID NO: 2733 | AGTAGCCTTCAAAACATTTTCTT | SEQ ID NO: 5099 |
| rs1059231 | GCTGGATGAGGTCATCTCCAAATAT | SEQ ID NO: 368 | GGTGGATGAGGTCATCTCCAAATAC | SEQ ID NO: 2734 | CAATGTTGCAAGACAAAAGTG | SEQ ID NO: 5100 |
| rs356966 | CCTGCTACGTGACTGTTCTCTCCAT | SEQ ID NO: 369 | CCTGCTACGTGACTGTTCTCTCCAC | SEQ ID NO: 2735 | GTGGTCCTGCTAATGTGAGTC | SEQ ID NO: 5101 |
| rs2394605 | TTTCTCTGACTTGGGCTGACAATTAC | SEQ ID NO: 370 | TTTCTCTGACTTGGGCTGACAATTAG | SEQ ID NO: 2736 | GTACTGTGAGACAACACCCTTG | SEQ ID NO: 5102 |
| rs2295118 | TCTGTGCGTCTGCACAAACTCT | SEQ ID NO: 371 | TCTGTGCGTCTGCACAAACTCC | SEQ ID NO: 2737 | CATATGTTGACACATGGTCTG | SEQ ID NO: 5103 |
| rs2050191 | GCCAAATCAACTTTTGGAGATTTTCTA | SEQ ID NO: 372 | GCCAAATCAACTTTTGGAGATTTTCTT | SEQ ID NO: 2738 | TAATGTACCTCTAAAATGAACAGC | SEQ ID NO: 5104 |
| rs427417 | TTTCCTCTCATACGGGAGCTTTCTT | SEQ ID NO: 373 | TTTCCTCTCATACGGGAGCTTTCTC | SEQ ID NO: 2739 | ATTCTGCTCATCTTGTTCCTGT | SEQ ID NO: 5105 |
| rs3828808 | CCCCACCTCAGTGTCCCTCAGA | SEQ ID NO: 374 | CCCCACCTCAGTGTCCCTCAGG | SEQ ID NO: 2740 | TAGAGGCCTCTAATCCATCCT | SEQ ID NO: 5106 |
| rs7383005 | TTAAAAAAGCTGGGCTGATCTTACAA | SEQ ID NO: 375 | TTTAAAAAGCTGGGCTGATCTTACAG | SEQ ID NO: 2741 | GCTTGCAAAGGTTTAGTAAAAA | SEQ ID NO: 5107 |
| rs6940585 | CTGTGGCAGAACAGAGCTGCCA | SEQ ID NO: 376 | CTGTGGCAGAACAGAGCTGCCG | SEQ ID NO: 2742 | TGGTCTCTCCATCTTCACACT | SEQ ID NO: 5108 |
| rs2294745 | TGTGAGGGGTAGGTTTTCCTTCCT | SEQ ID NO: 377 | TGTGAGGGGTAGGTTTTCCTTCCC | SEQ ID NO: 2743 | AAACCTGAGTATATAGAGGATTTAGG | SEQ ID NO: 5109 |
| rs3128854 | CCTTTGGGCAGTGATTAGGTCAT | SEQ ID NO: 378 | CCTTTGGGCAGTGATTAGGTCAC | SEQ ID NO: 2744 | AGGGAAGAGGCTTCATAAATG | SEQ ID NO: 5110 |
| rs1633037 | CAATCTGATGTGCAAGGTAATTCCATT | SEQ ID NO: 379 | CAATCTGATGTGCAAGGTAATTCCATC | SEQ ID NO: 2745 | TGCAAAGGAAGATTTGTTAC | SEQ ID NO: 5111 |
| rs3132550 | CTTCGTGAGAGCCCAGGCTGA | SEQ ID NO: 380 | CTTCGTGAGAGCCCAGGCTGG | SEQ ID NO: 2746 | GTCAGGAATGGAAACCCTATT | SEQ ID NO: 5112 |
| rs1610708 | CTGGTACCTGCGCATTGCAGA | SEQ ID NO: 381 | CTGGTACCTGCGCATTGCAGG | SEQ ID NO: 2747 | TCTCCTCATTCTTAAGGCCTT | SEQ ID NO: 5113 |
| rs2844766 | CTTGCCATGAGGTTTGGGTTGATT | SEQ ID NO: 382 | CTTGCCATGAGGTTGGGTTGATC | SEQ ID NO: 2748 | TrCAATGAAAGGAGAGCAAGA | SEQ ID NO: 5114 |
| rs4713447 | TCAACAGGAATTTCCTTCAGGATAAA | SEQ ID NO: 383 | TCAACAGGAATTTCCTTCAGGATAAG | SEQ ID NO: 2749 | AGGAAAAGAACATTTAGGCTTTT | SEQ ID NO: 5115 |
| rs4151671 | GGTGGGAGCAGCTGAAGTGAT | SEQ ID NO: 384 | GGTGGGAGCAGCTGAAGTGAC | SEQ ID NO: 2750 | CAGTCTATTCGTCCAGAGGAA | SEQ ID NO: 5116 |
| rs733840 | AATCACAACATCGTGCCACAGTA | SEQ ID NO: 385 | AATCACAACATCGTGCCACAGTT | SEQ ID NO: 2751 | CTATTATCTAATTGGGAAGATTTTC | SEQ ID NO: 5117 |
| rs3198005 | CCAGGAAGTCTGCATAATCACGAA | SEQ ID NO: 386 | CCAGGAAGTCTGCATTATCACGAG | SEQ ID NO: 2752 | AGCTTGGAAAGGAGGTAACAC | SEQ ID NO: 5118 |
| rs2523814 | GGTAATCTCCCAAGGCCCTGCT | SEQ ID NO: 387 | GGTAATCTCCCAAGGCCCTGCA | SEQ ID NO: 2753 | CTGTGCTCTGACATCCTCAGTA | SEQ ID NO: 5119 |
| rs7755580 | CAATGGCAGTGGCTAGAAAGAGTAAA | SEQ ID NO: 388 | CAATGGCAGTGGCTAGAAAGAGTAAT | SEQ ID NO: 2754 | AGGCCACGTACAGTGTCATATAT | SEQ ID NO: 5120 |
| rs2071364 | AAGGCTCAATGAAAGGATAATCTCCA | SEQ ID NO: 389 | AAGGCTCAATGAAAGGATAATCTCCG | SEQ ID NO: 2755 | ATTAGTGCTACCAAAGTGTCATT | SEQ ID NO: 5121 |
| rs2894239 | GAACAAAAACTGGATGAGAAGCCTT | SEQ ID NO: 390 | GAACAAAAACTGGATGAGATTTCCCTG | SEQ ID NO: 2756 | TCTTGTTTTATGTGGTTGAGAG | SEQ ID NO: 5122 |
| rs3117230 | GATTTCCAGGAAGGAGGAAGTAGAGT | SEQ ID NO: 391 | GATTTCCAGGAAGGAGGAAGTAGAGC | SEQ ID NO: 2757 | GAGTCAGAAGTTCAACAGAAGTC | SEQ ID NO: 5123 |
| rs1628578 | CAGCCCATGGTTCTGCATCTCT | SEQ ID NO: 392 | CAGCCCATGGTTCTGCATCTCG | SEQ ID NO: 2758 | GGAAGTCAGGATAAATTTGGC | SEQ ID NO: 5124 |
| rs362531 | CAGGGCCACATTGGGACACTT | SEQ ID NO: 393 | CAGGGCCACATTGGGACACTC | SEQ ID NO: 2759 | TAGATAACCGCCACAATTGTT | SEQ ID NO: 5125 |
| rs6899851 | GTTCACCTTTTCCCCATAGGTTAGTA | SEQ ID NO: 394 | GTTCACCTTTTCCCCATAGGTTAGTG | SEQ ID NO: 2760 | TGTCTCCTTTGCTATACTGAAAG | SEQ ID NO: 5126 |
| rs4084091 | AATAGCCTTGGCAGTAAACGCCA | SEQ ID NO: 395 | AATAGCCTTGGCAGTAAACGCCG | SEQ ID NO: 2761 | GAGTTCAGAAGAGTCACGGTG | SEQ ID NO: 5127 |
| rs2735097 | CCCAAAGGGAAACATCCCTCATA | SEQ ID NO: 396 | CCCAAAGGGAAACATCCCTCATC | SEQ ID NO: 2762 | AAGCCAAACCAGAAGCAATAT | SEQ ID NO: 5128 |
| rs1264698 | AAAGAATGCCACGGATTGCCA | SEQ ID NO: 397 | AAAGAATGCCACGGATTGCCC | SEQ ID NO: 2763 | CAAACACCAGGAGCTAGAAGA | SEQ ID NO: 5129 |
| rs2071789 | CCTTCCTGTACGGGGCCCTA | SEQ ID NO: 398 | CCTTCCTGTACGGGGCCCTG | SEQ ID NO: 2764 | ATTTCTCATCTCATTTCTGGG | SEQ ID NO: 5130 |
| rs3093544 | AGCTCCTCCATGTGCCTGCT | SEQ ID NO: 399 | AGCTCCTCCATGTGCCTGCC | SEQ ID NO: 2765 | TTCCTCTGTGTGTGGATCTAG | SEQ ID NO: 5131 |
| rs3132130 | TGAGAGCCCAGAACATGCATATAAAGG | SEQ ID NO: 400 | TGAGAGCCCAGAACATGCATATAAAGC | SEQ ID NO: 2766 | AACATATCTGTAAACTTCAAGGAA | SEQ ID NO: 5132 |
| rs3093669 | CCACCACGTCCGGCAGTTT | SEQ ID NO: 401 | CCACCACGTCCGGCAGTTC | SEQ ID NO: 2767 | GTTCCTTGTTCTTAATTGTCCTC | SEQ ID NO: 5133 |
| rs2092305 | TGTGTTCAAATAAGGATACACCCAGCT | SEQ ID NO: 402 | TGTGTTCAAATAAGGATACACCCAGCC | SEQ ID NO: 2768 | TAACCAATTGGGTGTTTCTGTA | SEQ ID NO: 5134 |
| rs3128927 | TGAGAAAGTGCCCTAGAACCTGTACA | SEQ ID NO: 403 | TGAGAAAGTGCCCTAGAACCTGTACG | SEQ ID NO: 2769 | TCTAAACTGTGAAACCCTGTTC | SEQ ID NO: 5135 |
| rs1633009 | TGTGAGTTCTCTGTACGGGGAAGTTT | SEQ ID NO: 404 | TGTGAGTTCTCTGTACGGGGAAGTTA | SEQ ID NO: 2770 | AAAAAGCAGGTCAAACTGTGAT | SEQ ID NO: 5136 |
| rs6914678 | TGTGAGTTTCTCTGTACGGGGAAGTTT | SEQ ID NO: 405 | TGTGAGTTCTCTGTACGGGGAAGTTA | SEQ ID NO: 2771 | AAAAAGCAGGTCAAACTGTGAT | SEQ ID NO: 5137 |
| rs8337 | GGGCAACTTACTCTTCCTGGCATG | SEQ ID NO: 406 | GGGCAACTTACTCTTCCTGGCATC | SEQ ID NO: 2772 | TATTGTATTGGAGGGTGACCA | SEQ ID NO: 5138 |
| rs2286712 | CCAGGGTAAGTGGCACCACAGG | SEQ ID NO: 407 | CAGGGTAAGTGGCACCACAGC | SEQ ID NO: 2773 | AGGAACAGAGGGTGTGAGAAT | SEQ ID NO: 5139 |
| rs1633086 | CCCCTATGCCTCCCACTCCT | SEQ ID NO: 408 | CCCCTATGCCTCCCACTCCC | SEQ ID NO: 2774 | ACTCTCCCTGACCCTAACTCT | SEQ ID NO: 5140 |
| rs2245514 | CCTGCGGTCCCCAGGTTCC | SEQ ID NO: 409 | CCTGCGGTCCCCAGGTTCG | SEQ ID NO: 2775 | GGTTTTTCACGTCTAATCTCAAT | SEQ ID NO: 5141 |
| rs1265086 | TTTAGGTCCCATCTGCTCGCTCT | SEQ ID NO: 410 | TTTAGGTCCCATCTGCTCGCTCG | SEQ ID NO: 2776 | TCTCCCACTAGGATGTAGGCT | SEQ ID NO: 5142 |
| rs466384 | CCTTCATAGCTGGACTCCATAAAGACA | SEQ ID NO: 411 | CCTTCATAGCTGGACTCCATAAAGACG | SEQ ID NO: 2777 | AGTACCTGGAAGAGAAGAAGAAC | SEQ ID NO: 5143 |
| rs3117225 | TCCAAATGTCCCCTAGTTCACAATAA | SEQ ID NO: 412 | TCCAAATGTCCCCTAGTTCACAATAG | SEQ ID NO: 2778 | AAGGGCTTAAATAGAGAAGTAAAG | SEQ ID NO: 5144 |
| rs209473 | CAGCTATTGCCAGCCACCGA | SEQ ID NO: 413 | CAGCTATTGCCAGCCACCGC | SEQ ID NO: 2779 | ACTGTTTAGAGGCTGAAGCAG | SEQ ID NO: 5145 |
| rs4151664 | CCTGGGCCACTGAAGCAAAAGA | SEQ ID NO: 414 | CCTGGGCCACTGAAGCAAAAGG | SEQ ID NO: 2780 | CACACACTTTGAGAAAGAGGG | SEQ ID NO: 5146 |
| rs909967 | CCTTGATTCAGAGCTCAGATGGATGA | SEQ ID NO: 415 | CCTTGATTCAGAGCTCAGATGGATGG | SEQ ID NO: 2781 | GCCTTAACTGTTACCTAGCCC | SEQ ID NO: 5147 |
| rs1633013 | TCACACTGCAAATCTCTATGCTCAGA | SEQ ID NO: 416 | TCACACTGCAAATCTCTATGCTCAGG | SEQ ID NO: 2782 | AGAACACAGACCTTTCAAGGAC | SEQ ID NO: 5148 |
| rs4151657 | TTTCCACATGTGTCAAATGTAGGACTA | SEQ ID NO: 417 | TTTCCACATGTGTCAAATGTAGGACTG | SEQ ID NO: 2783 | AGAAAGATCTCTGAAGTGCTCA | SEQ ID NO: 5149 |
| rs1419689 | GCTGGAAATACAGGTACACCTGGAAAT | SEQ ID NO: 418 | GCTGGAAATACAGGTACACCTGGAAAG | SEQ ID NO: 2784 | ACTTAGAAATAAATGCTTGTTGATT | SEQ ID NO: 5150 |
| rs3757333 | CCAGCGGGACCCAAGGAAA | SEQ ID NO: 419 | CCAGCGGGACCCAAGGAAC | SEQ ID NO: 2785 | CTAGAACTATACGTCCCAGAACA | SEQ ID NO: 5151 |
| rs1264541 | TGTGTTAAAAGGCACATATGTGCTTTT | SEQ ID NO: 420 | TGTGTTTAAAGGCACATATGTGCTTTG | SEQ ID NO: 2786 | TGCATGTAATTACTGCACATACA | SEQ ID NO: 5152 |
| rs7992 | CCATCCCCACTGTCCTCAAGAGA | SEQ ID NO: 421 | CCATCCCGACTGTCCTCAAGAGG | SEQ ID NO: 2787 | ACCAGGAAGGACTAGGCTACA | SEQ ID NO: 5153 |
| rs2523926 | AGCACTCTGGAGAAAGCCGGGT | SEQ ID NO: 422 | AGCACTCTGGAGAAAGCCGGGC | SEQ ID NO: 2788 | TGTGTCCTGATGCTCTTATCAC | SEQ ID NO: 5154 |
| rs3823419 | ACAAGGTTCATGGCCTGGGAAA | SEQ ID NO: 423 | ACAAGGTTCATGGCCTGGGAAG | SEQ ID NO: 2789 | GAAGACAGACATGAATAAATCATT | SEQ ID NO: 5155 |
| rs2735003 | TCTGAGTCCCTGAGAACCTAGGGT | SEQ ID NO: 424 | CTGAGTCCCTGAGAACCTAGGGG | SEQ ID NO: 2790 | TTGGTATGGGTTCACTGAAAAT | SEQ ID NO: 5156 |
| rs3817965 | CTGAGGAGAGACACACACGTGTGTAT | SEQ ID NO: 425 | CTGAGGAGAGACACACACCTGTGTAC | SEQ ID NO: 2791 | TTACCCTTCTGAGATCAGGAAG | SEQ ID NO: 5157 |
| rs2076540 | CAATTTTCCAAACCTGAAGTGTTGGA | SEQ ID NO: 426 | CAATTTCCAAACCTGAAGTGTTGGG | SEQ ID NO: 2792 | AAACAGAGTAAATAAAGGATAAGAGC | SEQ ID NO: 5158 |
| rs3998799 | TGAACTTGTCCTGAGAATGAAGGTG | SEQ ID NO: 427 | TGAACTTGTCCTGAGAATGAAGGTC | SEQ ID NO: 2793 | AGAGACAGTTTCTTCTTCTTCCT | SEQ ID NO: 5159 |
| rs2428510 | TAAGAAATCTTTGTGAAGCTGCCAT | SEQ ID NO: 428 | TAAGAAATCTTTGTGAAGCTGCCAC | SEQ ID NO: 2794 | CAGGTTTGTCAATTTGTGACAT | SEQ ID NO: 5160 |
| rs3094187 | TTGGAGGCTCCCCAAATATTTTGT | SEQ ID NO: 429 | TTGGAGGCTCCCCAAATATTTTGC | SEQ ID NO: 2795 | ATCTGAGGATCCAGCTCAAGT | SEQ ID NO: 5161 |
| rs2076484 | CCTGTGCAGGACCAGGTTCTTTT | SEQ ID NO: 430 | CCTGTGCAGGACCAGGTTCTTTC | SEQ ID NO: 2796 | CTGGGCTCCAAGATCTTAAAG | SEQ ID NO: 5162 |
| rs3763349 | CACCTGGGGACTCCTGTGTGT | SEQ ID NO: 431 | CACCTGGGGACTCCTGTGTGC | SEQ ID NO: 2797 | CCATTGTTAATGGTTTGAGGA | SEQ ID NO: 5163 |
| rs2523512 | AACATCCCCCACAGCTGTCAGA | SEQ ID NO: 432 | AACATCCCCCACAGCTGTCAGG | SEQ ID NO: 2798 | TGTCAAGGGTAACAGAGGTCAT | SEQ ID NO: 5164 |
| rs2517439 | CAGGGCCCAGAGTGCTTAGAGA | SEQ ID NO: 433 | CAGGGCCCAGAGTGCTTAGAGG | SEQ ID NO: 2799 | CATCATCTCTCCTTTGCTCTG | SEQ ID NO: 5165 |
| rs1419634 | CAAGGAAGTGAATGACTTGTACACTGGA | SEQ ID NO: 434 | CAAGGAAGTGAATGACTTGTACACTGGC | SEQ ID NO: 2800 | ACTGTAAAAACATTGATGAAAGG | SEQ ID NO: 5166 |
| rs241438 | TGGTGAAGGTCGTGTCCCTGTAA | SEQ ID NO: 435 | TGGTGAAGGTCGTGTCCCTGTAG | SEQ ID NO: 2801 | TTGATGTTTGCTGTTCCTCT | SEQ ID NO: 5167 |
| rs2244839 | GACAGACCATGGCCATGGCA | SEQ ID NO: 436 | GACAGACCATGGCCATGGCG | SEQ ID NO: 2802 | GATGATAGCAGCTCTCCTACG | SEQ ID NO: 5168 |
| rs3135033 | ATCACCTATTCCCAACGCGTG | SEQ ID NO: 437 | ATCACCTATTGCCCAACGCGTC | SEQ ID NO: 2803 | CTATTAAGTACTTACGAATCCTCAA | SEQ ID NO: 5169 |
| rs3135388 | CCTCATCAGGAAAAACCTAAAGTGGGA | SEQ ID NO: 438 | CCTCATCAGGAAAACCTAAAGTGGGG | SEQ ID NO: 2804 | TGGTTTGTTGGGAGATCTCTA | SEQ ID NO: 5170 |
| rs3807033 | CAGATCCTGGTTTGTGTGGCTTTA | SEQ ID NO: 439 | CAGATCCTGGTTTGTGTGGCTTTG | SEQ ID NO: 2805 | CAAGCCTCTGAGTGTTGATGT | SEQ ID NO: 5171 |
| rs4713446 | TGGCTTGAAGATTAGGGAAATAGTGTT | SEQ ID NO: 440 | TGGCTTGAAGATTAGGGAAATAGTGTC | SEQ ID NO: 2806 | ACATTTCAAAAGAGAAGACTGCT | SEQ ID NO: 5172 |
| rs3115608 | CCAGTTCAGGGACGGAGATTCCT | SEQ ID NO: 441 | CCAGTTCAGGGACGGAGATTCCG | SEQ ID NO: 2807 | GATGAAAAGTGAAGGGAGAGG | SEQ ID NO: 5173 |
| rs1736994 | CAATCCTGCTAATGTGAGTCAGATTGTT | SEQ ID NO: 442 | CAATCCTGCTAATGTGAGTCAGATTGTG | SEQ ID NO: 2808 | CATTTCTTCACTTAAAAGCCTCT | SEQ ID NO: 5174 |
| rs6913309 | AGGATACTGGAAGGGAACTCACTCTA | SEQ ID NO: 443 | AGGATACTGGAAGGGAACTCACTCTT | SEQ ID NO: 2809 | CTGGGCTTTAGAATTATTTCTAGT | SEQ ID NO: 5175 |
| rs6905408 | ATTGGTCCCTGAGCTTAGCCCTA | SEQ ID NO: 444 | ATTGGTCCCTGAGCTTAGCCCTG | SEQ ID NO: 2810 | AGGAAAAATGGCTTTTTTTC | SEQ ID NO: 5176 |
| rs3128917 | CTGCCCAGCAAGAAACTCAGATAA | SEQ ID NO: 445 | CTGCCCAGCAAGAAACTCAGATTC | SEQ ID NO: 2811 | ACAGGTTCCACTATCTGACCC | SEQ ID NO: 5177 |
| rs6934041 | AGCTCTGCCGTTTGACCTGTGTC | SEQ ID NO: 446 | AGCTCTGCCGTTTGACCTGTGTG | SEQ ID NO: 2812 | TCCACAAGAAAGAAACTTCC | SEQ ID NO: 5178 |
| rs6916248 | TTCTGGAAATTGAAGGAAGGAAACT | SEQ ID NO: 447 | TTCTGGAAATTGAAGGAAGGAAACC | SEQ ID NO: 2813 | GACCTCCTTCTAAACACTCGAG | SEQ ID NO: 5179 |
| rs5007263 | CTTCCTCACTCAGCCTGCTTCACA | SEQ ID NO: 448 | CTTCCTCACTCAGCCTGCTTCACG | SEQ ID NO: 2814 | GAACACTGTGAGGGTCAAAT | SEQ ID NO: 5180 |
| rs3819300 | CCCTGGGCACTGTCGCTGG | SEQ ID NO: 449 | CCCTGGGCACTGTCGCTGC | SEQ ID NO: 2815 | TGGAGTAGAACAAAAACAGGAC | SEQ ID NO: 5181 |
| rs2071471 | CCTCCATGACTCAAGGCACAGAT | SEQ ID NO: 450 | CCTCCATGACTCAAGGCACAGAC | SEQ ID NO: 2816 | CTCCAGGTAAGAACAGAGCAAT | SEQ ID NO: 5182 |
| rs2894179 | AAAATGGAAATGGCCTAAATGTCCA | SEQ ID NO: 451 | AAAATGGAAATGGCCTAAATGTCCC | SEQ ID NO: 2817 | CAACGGATGAATGGAAAATAA | SEQ ID NO: 5183 |
| rs2239705 | ATGCCTGGACCCTTGTCTGTTTT | SEQ ID NO: 452 | ATGCCTGGACCCTTGTCTGTTTC | SEQ ID NO: 2818 | GCTTTTCCCTTTCTCTCTTC | SEQ ID NO: 5184 |
| rs2301220 | CCCAGACTTTCACATACACATTCATCA | SEQ ID NO: 453 | CCCAGACTTTCACATACACATTCATCG | SEQ ID NO: 2819 | TTTCTTTCATGATAATAGTTGCTT | SEQ ID NO: 5185 |
| rs2272904 | GGAGAATGGACCCCCAGGGA | SEQ ID NO: 454 | GGAGAATGGACCCCCAGGGC | SEQ ID NO: 2820 | ACTTGGAAAGCGAGTAAGTGAG | SEQ ID NO: 5186 |
| rs6935418 | TGCTAGACTCTCCATAGGATGCTGAATA | SEQ ID NO: 455 | TGCTAGACTCTCCATAGGATGCTGAATC | SEQ ID NO: 2821 | AAGTAGTGAGAGCTGACATCCTC | SEQ ID NO: 5187 |
| rs5021450 | TGAAAAAAGGTAAGTTTCCCTGTGATT | SEQ ID NO: 456 | TGAAAAAAGGTAAGTTTCCCTGTGATG | SEQ ID NO: 2822 | CTACATTTTAGCTCATTCCCTAGT | SEQ ID NO: 5188 |
| rs2857103 | CCTCTGCTTCCCTTTTGTTTGCA | SEQ ID NO: 457 | CCTCTGCTTCCCTTTTGTTTGCC | SEQ ID NO: 2823 | TCTCTTGTTATGTCTTTGCCC | SEQ ID NO: 5189 |
| rs2853953 | CACAGACACCTTCCTGCCCTAGTA | SEQ ID NO: 458 | CACAGACACCTTCCTGCCCTAGTG | SEQ ID NO: 2824 | ATTTGGACTGGAGTTTCCTT | SEQ ID NO: S190 |
| rs757259 | GAAGAAGCAATTCACTGACTCCTTTCTT | SEQ ID NO: 459 | GAAGAAGCAATTCACTGACTCCACTC | SEQ ID NO: 2825 | AACTGGGGATAAATAACCTCTAA | SEQ ID NO: 5191 |
| rs3135391 | TCTCTCAGTTCCACAGGGCTGTTT | SEQ ID NO: 460 | TCTCTCAGTTCCACAGGGCTGTTC | SEQ ID NO: 2826 | TGAGCACAGTTACCTCTGGAG | SEQ ID NO: 5192 |
| rs2523606 | CCTCACCCCTTCCCTACCTGAA | SEQ ID NO: 461 | CCTCACCCCTTCCCTACCTGAG | SEQ ID NO: 2827 | TCTTCCTCCTACACATCACAG | SEQ ID NO: 5193 |
| rs1632962 | TCTTTCGCTCTGGTTTTTAATGAGAT | SEQ ID NO: 462 | TCTTTCGCTCTGGTTTTAAATGAGAC | SEQ ID NO: 2828 | TGGTAGACATGATTTGGACATC | SEQ ID NO: 5194 |
| rs3135353 | CATCACTAAGCTAAAGGGACAAGCTCTA | SEQ ID NO: 463 | CATCACTTAGCTAAAGGGACAAGCTCTG | SEQ ID NO: 2829 | GAAATGTGTCATAAGGTGTTTTC | SEQ ID NO: 5195 |
| rs3130235 | GTTCCTTTCTCCTTAGTGCCATGAA | SEQ ID NO: 464 | GTTGCTTTCTCCTTAGTGCCATGAG | SEQ ID NO: 2830 | AATCAAAACCCAACATGATTG | SEQ ID NO: 5196 |
| rs2394606 | TTCTACTGGCATGAAGACAGACAGAG | SEQ ID NO: 465 | TTCTACTGGCATGAAGACAGACAGAC | SEQ ID NO: 2831 | GAAATCTCAAGGGTGTTGTCT | SEQ ID NO: 5197 |
| rs2734997 | TGGTCATAAAATGAATAAAGCACTGGT | SEQ ID NO: 466 | TGGTCATAAAATGAATAAAGCACTGGC | SEQ ID NO: 2832 | TATGCTAAAACATTGCTGAATCT | SEQ ID NO: 5198 |
| rs3998794 | TTGGTCTCTTCTGAAGATTTCACAAAA | SEQ ID NO: 467 | TTGGTCTCTTCTGAAGATTTCACAAAG | SEQ ID NO: 2833 | TGGGTTCATGAAATATGTATCC | SEQ ID NO: 5199 |
| rs2844463 | TGAGAAGAACTGCTGCTCTCCCTAT | SEQ ID NO: 468 | TGAGAAGAACTGCTGCTCTCCCTAC | SEQ ID NO: 2834 | GCAAGGAAATCCAAATGGTAT | SEQ ID NO: 5200 |
| rs7452233 | AAAGAAGGGCAATGGAAGAAGGAT | SEQ ID NO: 469 | AAAGAAGGGCAATGGAAGAAGGAC | SEQ ID NO: 2835 | GTCTCCAACTCTGAAGGGAG | SEQ ID NO: 5201 |
| rs6910598 | AAACCAGAAGGCCCCCAGGTC | SEQ ID NO: 470 | AAACCAGAAGGCCCCCAGGTG | SEQ ID NO: 2836 | ATCTCTGGTTTCCACACACAC | SEQ ID NO: 5202 |
| rs3129008 | ACATCATGGGCCTCAATTGCTA | SEQ ID NO: 471 | ACATCATGGGCCTCAATTGCTG | SEQ ID NO: 2837 | TGAGTTGGACATTCAGAGGT | SEQ ID NO: 5203 |
| rs1150741 | GGAGGTTTCCGGTGTCAGCTA | SEQ ID NO: 472 | GGAGGTTTCCGGTGTCAGCTG | SEQ ID NO: 2838 | CTCTGGTTGTCTCCATAACCA | SEQ ID NO: 5204 |
| rs7774452 | TCTGCTTAGTTAGGAAGTTCCGAAT | SEQ ID NO: 473 | TCTGCTTAGTTAAGGAAGTTCCGAAC | SEQ ID NO: 2839 | CAGATAACTCAGAATCAGGTTTAA | SEQ ID NO: 5205 |
| rs6911724 | GGAAAGGCTGGAGAATTTAAGAACAAAT | SEQ ID NO: 474 | GGAAAGGCTGGAGAATTTAAGAACAAAC | SEQ ID NO: 2840 | ATTTAGACAAGTACTACAACCCCC | SEQ ID NO: 5206 |
| rs2294479 | CGTACCCAGAGTGGAGTGAACAATCTC | SEQ ID NO: 475 | CGTACCCAGAGTGGAGTGAACAATCTG | SEQ ID NO: 2841 | AGACTAACTCTTGCAGGATGC | SEQ ID NO: 5207 |
| rs417374 | TGATTTCTGGAATGGATGCCTGA | SEQ ID NO: 476 | TGATTTCTGGAATGGATGCCTGG | SEQ ID NO: 2842 | ATCAGAGCCAGGTATTTCAGG | SEQ ID NO: 5208 |
| rs1633030 | AGTCCAGTCCAGGGCTGCATCA | SEQ ID NO: 477 | AGTCCAGTCCAGGGCTGCATCG | SEQ ID NO: 2843 | CTGAGAGCTTCACTAGGGCTT | SEQ ID NO: 5209 |
| rs2024679 | GCGTCAACATTCCCAATGTGTGT | SEQ ID NO: 478 | GCGTCAACATTCCCAATGTGTGC | SEQ ID NO: 2844 | CCATTTTTCCTTTCTCACAC | SEQ ID NO: 5210 |
| rs3116999 | ACTGTTTTTTACCTCCACAGGGTTC | SEQ ID NO: 479 | ACTGTTTTTTACCTCCACAGGGTTG | SEQ ID NO: 2845 | TGACCTTGCCTAAAAGACTAAT | SEQ ID NO: 5211 |
| rs3765605 | CCAAGACACACGTGACCCACCA | SEQ ID NO: 480 | CCAAGACACACGTGACCCACCC | SEQ ID NO: 2846 | CCTCTCTGAACATGAGGCATA | SEQ ID NO: 5212 |
| rs2844603 | ACAAGGGGTGTCTGCTGCTGTA | SEQ ID NO: 481 | ACAAGGGGTGTCTGCTGCTGTG | SEQ ID NO: 2847 | CCACACTTGGAGAAAGAAAC | SEQ ID NO: 5213 |
| rs2621419 | TCACTTTTCCAGACAAAATACATGGAT | SEQ ID NO: 482 | TCACTTTTCCAGACAAAATACATGGAC | SEQ ID NO: 2848 | TGGTGATGCTTTAATCTAAATAGT | SEQ ID NO: 5214 |
| rs1362073 | TTTGGCTTCATAGCTGGGAAGAAA | SEQ ID NO: 483 | TTTGGCTTCATAGCTGGGAAGAAG | SEQ ID NO: 2849 | TTTGAAAAACAATCTAACTTTTACT | SEQ ID NO: 5215 |
| rs2072634 | CATCTTCCAGGTTTTCCATATCCTTA | SEQ ID NO: 484 | CATCTTCCAGGTTTTCCATATCCTTG | SEQ ID NO: 2850 | CTTTGAACACATGTTGCTCAT | SEQ ID NO: 5216 |
| rs213208 | CAGCATCCTAGGAGCTGACCACAT | SEQ ID NO: 485 | CAGCATCCTAGGAGCTGACCACAG | SEQ ID NO: 2851 | CTGATCATTAGGGCTGGAAAT | SEQ ID NO: 5217 |
| rs3956934 | TGTTCTACACCCAGAGTCACAAACTG | SEQ ID NO: 486 | TGTTCTACACCCAGAGTCACAAACTC | SEQ ID NO: 2852 | TATGTCAGCATTACCAGTTAGAAG | SEQ ID NO: 5218 |
| rs3117227 | GGTGGTCCACCCAACAGACAACA | SEQ ID NO: 487 | GGTGGTCCACCCAACAGACAACG | SEQ ID NO: 2853 | TGCCTCAGATGGTTATCAAG | SEQ ID NO: 5219 |
| rs4713215 | CAAGTCAGCGTTAATAGGGGGCAA | SEQ ID NO: 488 | CAAGTCAGCGTTAATAGGGGGCAG | SEQ ID NO: 2854 | TTTTAAGTGCACCACCACTT | SEQ ID NO: 5220 |
| rs1632942 | CCTTGTGCTAGGCCAGGCTGA | SEQ ID NO: 489 | CCTTGTGCTAGGCCAGGCTGG | SEQ ID NO: 2855 | AGGTCTACAGGAGATCAGGGA | SEQ ID NO: 5221 |
| rs3129886 | TGTAACTGATTTTCCCTCCAAGGGT | SEQ ID NO: 490 | TGTAACTGATTTTCCGTCCAAGGGC | SEQ ID NO: 2856 | TAACCTTGCCATTAACAAGC | SEQ ID NO: 5222 |
| rs2071798 | CAAATGTTACCTACTAAGGGATGCCTGA | SEQ ID NO: 491 | CAAATGTTACCTACTAAGGGATGCCTGG | SEQ ID NO: 2857 | TAAGCCACTCAGCTACCTAATTC | SEQ ID NO: 5223 |
| rs2523586 | GCTGAGCAGCTGCTGAGTATTGCT | SEQ ID NO: 492 | GCTGAGCAGCTGCTGAGTATTGCG | SEQ ID NO: 2858 | GAATCCCAGCTTATTCATTG | SEQ ID NO: 5224 |
| rs3117234 | CAGGGTTGGAGATCTGTTGATGAA | SEQ ID NO: 493 | CAGGGTTGGAGATCTGTTGATGAG | SEQ ID NO: 2859 | GTTGAAACCAATGACGATGAG | SEQ ID NO: 5225 |
| rs2071473 | TCAGGGACTTCGAGGGCTATTGTA | SEQ ID NO: 494 | TCAGGGACTTCGAGGGCTATTGTG | SEQ ID NO: 2860 | CCTCAAAGAGAAGCAGTAATT | SEQ ID NO: 5226 |
| rs3094041 | CATTAGCAATTTCACAATCTTGGGGT | SEQ ID NO: 495 | CATTAGCAATTTCACAATCTTGGGGC | SEQ ID NO: 2861 | ATTTTTGCTAAATATTTATCTTCCT | SEQ ID NO: 5227 |
| rs2596472 | CCAGATGTCTGAAAGGTTGAAGCCA | SEQ ID NO: 496 | CCAGATGTCTGAAAGGTTGAAGCCG | SEQ ID NO: 2862 | ATGTTGCTGAGACCATTGCTAT | SEQ ID NO: 5228 |
| rs2213570 | ATACAGCTGGCCCTGTATTTGTGT | SEQ ID NO: 497 | ATACAGCTGGCCCTGTATTTGTGG | SEQ ID NO: 2863 | TTTTGCATCCTCTGATTTAGT | SEQ ID NO: 5229 |
| rs1736922 | GAGAGACACCCCAGAGCCCTGA | SEQ ID NO: 498 | GAGAGACACCCCAGAGCCCTGG | SEQ ID NO: 2864 | CACTGTCAGTGATTGGGGTAG | SEQ ID NO: 5230 |
| rs3129269 | TATTTCAGTGAGCTGCCCCATCA | SEQ ID NO: 499 | TATTTCAGTGAGCTGCCCCATCC | SEQ ID NO: 2865 | CATGTTTGGTGTCTTCATCC | SEQ ID NO: 5231 |
| rs6920457 | TCTTCAATAAAGGAAACCAAGGAGAA | SEQ ID NO: 500 | TCTTCAATAAAGGAAACCAAGGAGAC | SEQ ID NO: 2866 | GTTGCCAGAAGTCAGATTAGAG | SEQ ID NO: 5232 |
| rs4711229 | TTTCCAACCACTGACAGTTTAACAAA | SEQ ID NO: 501 | TTTCCAACCACTGACAGTTTAACAAC | SEQ ID NO: 2867 | AGCTTGCAAATTTCCTGAATAT | SEQ ID NO: 5233 |
| rs1799964 | CCTCCAGACCCTGACTTTTCCTTCA | SEQ ID NO: 502 | CCTCCAGACCCTGACTTTTCCTTCG | SEQ ID NO: 2868 | CTTCTCAGCTTCTCCTTTGCT | SEQ ID NO: 5234 |
| rs4959037 | TCGAACCTCACCTTCTGTCTAGAGA | SEQ ID NO: 503 | TCGAACCTCACCTTCTGTCTAGAGT | SEQ ID NO: 2869 | ACAACAGGAGTGATTTATATTCC | SEQ ID NO: 5235 |
| rs1611652 | GCAGGGCCTTGGGAGATTACCG | SEQ ID NO: 504 | GCAGGGCCTTGGGAGATTACCC | SEQ ID NO: 2870 | GCATTACTCAAACCTTCTGC | SEQ ID NO: 5236 |
| rs2071354 | GGTGGAGCAGGAGCCCACAT | SEQ ID NO: 505 | GGTGGAGCAGGAGCCCACAC | SEQ ID NO: 2871 | CCTTGGACAAAAAGGAGAGAA | SEQ ID NO: 5237 |
| rs1737012 | TTAATTTCCTCTCTTGAGTGTGGCTT | SEQ ID NO: 506 | TTAATTTCCTCTCTTGAGTGTGGCTG | SEQ ID NO: 2872 | GACTTAATGATGCAAACTGATAT | SEQ ID NO: 5238 |
| rs1988564 | GCTTCTTTGCTTCTCAAACACCCAT | SEQ ID NO: 507 | GCTTCTTTGCTTCTCAAACACCCAC | SEQ ID NO: 2873 | ACCACATCTCAGATTGCATC | SEQ ID NO: 5239 |
| rs2071790 | CCACATCCACTTGGATTCCAGGA | SEQ ID NO: 508 | CCACATCCACTTGGATTCCAGGG | SEQ ID NO: 2874 | GTAAGCCTCTCGACTTCAGG | SEQ ID NO: 5240 |
| rs465151 | GTCAGTGGCCTCACTGTCAGCA | SEQ ID NO: 509 | GTCAGTGGCCTCACTGTCAGCG | SEQ ID NO: 2875 | TCAGTTGGGGTGAGATAGTC | SEQ ID NO: 5241 |
| rs1265759 | GCTATCACAAATAATGCTGCAAAGACAA | SEQ ID NO: 510 | GCTATCACAAATAATGCTGCAAAGACAG | SEQ ID NO: 2876 | CCTTAAGTAGATGGAAAAGAGTTT | SEQ ID NO: 5242 |
| rs2239701 | TGAGAGACAACTGAGAGACATTCCAT | SEQ ID NO: 511 | TGAGAGACAACTGAGAGACATTCCAC | SEQ ID NO: 2877 | TGAGACTTAAATTCCTTTTGTACT | SEQ ID NO: 5243 |
| rs3129883 | TCTTGGCCCAATCTCTCTCCACT | SEQ ID NO: 512 | TCTTGGCCCAATCTCTGTCCACC | SEQ ID NO: 2878 | CTTCCTGCCTACATGTATGTAG | SEQ ID NO: 5244 |
| rs2032502 | ACTCCCCCCTTATGGAGTCCCA | SEQ ID NO: 513 | ACTCCCCCCTTATGGAGTCCCG | SEQ ID NO: 2879 | AGTAGAGTAGGTGGACATCACTA | SEQ ID NO: 5245 |
| rs3778612 | GCATATGAGGGCACACCTGGTTA | SEQ ID NO: 514 | GCATATGAGGGCACACCTGGTTC | SEQ ID NO: 2880 | TTGTAGGGATTAAATTAATTTTTCT | SEQ ID NO: 5246 |
| rs2248871 | CTTGAATGAAGGACAACATGCATGT | SEQ ID NO: 515 | CTTGAATGAAGGACAACATGCATGG | SEQ ID NO: 2881 | GAAAGGTGGACAAATCACAG | SEQ ID NO: 5247 |
| rs2239707 | CATCTTGAATCCTGCTGGTCACTCA | SEQ ID NO: 516 | CATCTTGAATCCTGCTGGTCACTCG | SEQ ID NO: 2882 | TCCCTTGGTCTTAAAGCAAT | SEQ ID NO: 5248 |
| rs2734916 | CTCCCTTCCAGAGGTGCAGCTT | SEQ ID NO: 517 | CTCCCTTCCAGAGGTGCAGCTG | SEQ ID NO: 2883 | ATTCCCTCTCTTGAGTGTGG | SEQ ID NO: 5249 |
| rs2301753 | ATAGTGGCTCTCCTCGTCGTCCT | SEQ ID NO: 518 | ATAGTGGCTCTCCTCGTCGTCCG | SEQ ID NO: 2884 | ATCCTCCCCAGAAGAGTCTCT | SEQ ID NO: 5250 |
| rs2735042 | TGAGACTGTACGAATTTTATGACTGCAT | SEQ ID NO: 519 | TGAGACTGTACGAATTTTATGACTGCAC | SEQ ID NO: 2885 | ACAAATTATCACAAATATTGGCTT | SEQ ID NO: 5251 |
| rs3179375 | GACAGTGCCCAGGGCTCTGATA | SEQ ID NO: 520 | GACAGTGCCCAGGGCTCTGATG | SEQ ID NO: 2886 | GTCCCTCACAGCTTGTAAAG | SEQ ID NO: 5252 |
| rs3129869 | TGGCCCATTCTCCTGACTCTTTAA | SEQ ID NO: 521 | TGGCCCATTCTCCTGACTCTTTAC | SEQ ID NO: 2887 | TTTCAGGAAAGGTATTCCTG | SEQ ID NO: 5253 |
| rs7143 | GCTATATCTGCTCAGAGCTCACAAATGT | SEQ ID NO: 522 | GCTATATCTGCTCAGAGCTCACAAATGC | SEQ ID NO: 2888 | TTTGAATTATTTCCCTGACTTC | SEQ ID NO: 5254 |
| rs2068204 | TTCCAGAGCCAGCTAAGAATAGTACAA | SEQ ID NO: 523 | TTCCAGAGCCAGCTAAGAATAGTACAG | SEQ ID NO: 2889 | AGAACAGGATTGTGGACTAATTT | SEQ ID NO: 5255 |
| rs2745411 | CACAATGACACCCACCCCTCA | SEQ ID NO: 524 | CAGAATGACACCCACCCCTCG | SEQ ID NO: 2890 | CTTCTTCCTGAAATACCTGGC | SEQ ID NO: 5256 |
| rs462093 | GACCCCCATTCCCTGCCTTA | SEQ ID NO: 525 | GACCCCCATTCCCTGCCTTT | SEQ ID NO: 2891 | GGGACTGTCTTTTCTCGTTTT | SEQ ID NO: 5257 |
| rs3817966 | TCAGAGAACTCAGAGGAGTGACTCTTCT | SEQ ID NO: 526 | TCAGAGAACTCAGAGGAGTGACTCTTCC | SEQ ID NO: 2892 | CTTAAACCTTCTTGAGAGACAGAC | SEQ ID NO: 5258 |
| rs2256919 | GTCGTTTTCCTGGCACTGTTTCTT | SEQ ID NO: 527 | GTCGTTTTCCTGGCACTGTTTCTG | SEQ ID NO: 2893 | AAAAGATGCACTGATCCTCC | SEQ ID NO: 5259 |
| rs3957010 | TCCTTTTACATTATTTGTCTCCCCAGTT | SEQ ID NO: 528 | TCCTTTTACATTATTTGTCTCCCCAGTC | SEQ ID NO: 2894 | TACCTTCTGTGTTTCTCTTTGAT | SEQ ID NO: 5260 |
| rs1610710 | AGATGGGGTAAGGAGACGAATGAGA | SEQ ID NO: 529 | AGATGGGGTAAGGAGACGAATGAGG | SEQ ID NO: 2895 | GTCATGTCTCTTCTCAGGCAA | SEQ ID NO: 5261 |
| rs2735067 | GGCTCACTCCTCATGCCATTCA | SEQ ID NO: 530 | GGCTCACTCCTCATGCCATTCG | SEQ ID NO: 2898 | TTCTCTGCTCAAATGTCCCTTA | SEQ ID NO: 5262 |
| rs3126963 | GGAAAATGCTGCTGACTTGTTTTTGT | SEQ ID NO: 531 | GGAAAATGCTGCTGACTTGTTTTTGC | SEQ ID NO: 2897 | TAGTAATTTCAGCTGTCACATAATAA | SEQ ID NO: 5263 |
| rs7382938 | GTCCCTTCCCACAAGGCCATA | SEQ ID NO: 532 | GTCCCTTCCCACAAGGCCATG | SEQ ID NO: 2898 | CTCAGGCTGTCTCTCTCAGTG | SEQ ID NO: 5264 |
| rs3828901 | TAAGATTCAAGACAGGGCACAGTCA | SEQ ID NO: 533 | TAAGATTCAAGACAGGGCACAGTCG | SEQ ID NO: 2899 | TACCATCAGGAAGGTTCAAAC | SEQ ID NO: 5265 |
| rs3131043 | CCTGCAGTTGCCTTCAATGACTCT | SEQ ID NO: 534 | CCTGCAGTTGCCTTCAATGACTCC | SEQ ID NO: 2900 | ATTCTGGTTACCTGCTGCTC | SEQ ID NO: 5266 |
| rs2107197 | CATTCTCCCTTGAACCTCAACTCTATCT | SEQ ID NO: 535 | CATTCTCCCTTGAACCTCAACTCTATCC | SEQ ID NO: 2901 | TTCCCAGAGACTTGAAATAAAA | SEQ ID NO: 5267 |
| rs3106190 | GTGGGAGGGGTTCAGAAGCAGG | SEQ ID NO: 536 | GTGGGAGGGGTTCAGAAGCAGC | SEQ ID NO: 2902 | GCGTTTTTTCTCTGCTCTTC | SEQ ID NO: 5268 |
| rs1633102 | TCAGAAAAGGTAACTGGGCATGACA | SEQ ID NO: 537 | TGAGAAAAGGTAACTGGGCATGACG | SEQ ID NO: 2903 | TTCTGAGAACTTGACCATGG | SEQ ID NO: 5269 |
| rs3117120 | GCTCAATGATGGGGAAGGAAAAGG | SEQ ID NO: 538 | GCTCAATGATGGGGAAGGAAAAGC | SEQ ID NO: 2904 | GGTGAGGGACAAAATCTCAG | SEQ ID NO: 5270 |
| rs4713610 | TGGGTGAGTTACTTTACTTCTGTGGTCA | SEQ ID NO: 539 | TGGGTGAGTTACTTTACTTCTGTGGTCC | SEQ ID NO: 2905 | TTCCCCAATATGTAAAATAATTTC | SEQ ID NO: 5271 |
| rs2076522 | ACACTTTATTTGTTCCCCAGTCTGG | SEQ ID NO: 540 | ACACTTTATTTGTTCCCCAGTCTGC | SEQ ID NO: 2906 | TCTTTACATTTTAGCATCTGACC | SEQ ID NO: 5272 |
| rs2853937 | GCTCCCCAAGGCATAGTTTAATATGT | SEQ ID NO: 541 | GCTCCCCAAGGCATAGTTTAATATGC | SEQ ID NO: 2907 | TTTCTATTATCTGTATTGCCTCTAA | SEQ ID NO: 5273 |
| rs867464 | TCTCTTCATCCCTGTTCTTCACATT | SEQ ID NO: 542 | TCTCTTCATCCCTGTTCTTCACATC | SEQ ID NO: 2908 | GTATATCCAACTACCTACCTGTTG | SEQ ID NO: 5274 |
| rs2074466 | GCGGCCCCAATACCATCCA | SEQ ID NO: 543 | GCGGCCCCAATACCATCCC | SEQ ID NO: 2909 | CAGTTCTTGTGTGAGATCCAG | SEQ ID NO: 5275 |
| rs7382649 | GATGACTGGCGTGCTCCTAACAA | SEQ ID NO: 544 | GATGACTGGCGTGCTCCTAACAG | SEQ ID NO: 2910 | TGTTCAGACAGAAGGCACCTA | SEQ ID NO: 5276 |
| rs7452209 | CCTAGTAAGAGTCATGCTGAGGGAAGAT | SEQ ID NO: 545 | CCTAGTAAGAGTCATGCTGAGGGAAGAG | SEQ ID NO: 2911 | TTTGAATAATCATTTCATCATTACA | SEQ ID NO: 5277 |
| rs5007238 | CTCGAGGGCGTTTTTCCTTGA | SEQ ID NO: 546 | CTCGAGGGCGTTTTTCCTTGC | SEQ ID NO: 2912 | GGTATTTTCAGTTCTATTAACACTTC | SEQ ID NO: 5278 |
| rs757262 | CCTGGTCATTGATCTGGAAAGGAT | SEQ ID NO: 547 | CCTGGTCATTGATCTGGAAAGGAC | SEQ ID NO: 2913 | GCCAAGGAATTAGACACCAAC | SEQ ID NO: 5279 |
| rs1611407 | TTTAGGCCAGATTTGGTGGCTCA | SEQ ID NO: 548 | TTTAGGCCAGATTTGGTGGCTCG | SEQ ID NO: 2914 | ACCTGCAATCCTAGCATTGT | SEQ ID NO: 5280 |
| rs1655937 | GAGATCTACAGGCGATCAGGGAGA | SEQ ID NO: 549 | GAGATCTACAGGCGATCAGGGAGG | SEQ ID NO: 2915 | GTCTTGTGTTCCCTGGTACC | SEQ ID NO: 5281 |
| rs2269704 | GGCCACGAGGGAGAAGCAA | SEQ ID NO: 550 | GGCCACGAGGGAGAAGCAG | SEQ ID NO: 2916 | GAGACAGTAGAAGAGCATGGG | SEQ ID NO: 5282 |
| rs2734331 | CCTCCTGCCTCATCATGACCACA | SEQ ID NO: 551 | CCTCCTGCCTCATCATGACCACG | SEQ ID NO: 2917 | AGATCCTTCGGTGAGAGATG | SEQ ID NO: 5283 |
| rs3998178 | TGTACAGGAGCTTTGGAATACTGGT | SEQ ID NO: 552 | TGTACAGGAGCTTTGGAATACTGGC | SEQ ID NO: 2918 | AGCATCACTGTCTCCAPAAGTTA | SEQ ID NO: 5284 |
| rs885914 | GGAAGGTGGCAATACAGAAAAAAAA | SEQ ID NO: 553 | GGAAGGTGGCAATACAGAAAAAAAC | SEQ ID NO: 2919 | AATCAGGTGTTTTTTTTTAAGC | SEQ ID NO: 5285 |
| rs6925041 | TGCTAGTATCTGTATTTGGTGCTGTGT | SEQ ID NO: 554 | TGCTAGTATCTGTATTTGGTGCTGTGC | SEQ ID NO: 2920 | CCTTCTACCCTTCAATGTAAAGA | SEQ ID NO: 5266 |
| rs441126 | TCATATCTTTTGGCACCTTCTAGAATGT | SEQ ID NO: 555 | TCATATCTTTTGGCACCTTCTAGAATGC | SEQ ID NO: 2921 | TTCTCTGATTAGAATTCTTCTTCC | SEQ ID NO: 5287 |
| rs2394604 | GGCCTGTCCTAAGGAGATGTATGAGTT | SEQ ID NO: 556 | GGCCTGTCCTAAGGAGATGTATGAGTG | SEQ ID NO: 2922 | GGTACTTATCTAATTGACTTAACCC | SEQ ID NO: 5288 |
| rs2074502 | AACAGCAGCAGCCGCAACATAT | SEQ ID NO: 557 | AACAGCAGCAGCCGCAACATAC | SEQ ID NO: 2923 | GAACGGTTGCCATAGACTCT | SEQ ID NO: 5289 |
| rs3815100 | CACCTGCAACAGACTCAGCACAGA | SEQ ID NO: 558 | CACCTGCAACAGACTCAGCACAGC | SEQ ID NO: 2924 | AACATGCAAATTCTGGAAGGT | SEQ ID NO: 5290 |
| rs1632932 | GTTTTTCCTGATCCCGCCCTGA | SEQ ID NO: 559 | GTTTTTCCTGATCCCGCCCTGG | SEQ ID NO: 2925 | TCTGCAGTCACACATTTCTG | SEQ ID NO: 5291 |
| rs2076524 | GCTCTGCCTCTAGGACCCACAT | SEQ ID NO: 560 | GCTCTGCCTCTAGGACCCACAC | SEQ ID NO: 2926 | CTCAGATCAGCAGGAGAGGT | SEQ ID NO: 5292 |
| rs7759127 | GGGTTTCTTTGCATTCGGTATTTAATACA | SEQ ID NO: 561 | GGGTTCTGCATTCGGTATTTAATACC | SEQ ID NO: 2927 | TTTGTGTGACTGCCTTAAAACTA | SEQ ID NO: 5293 |
| rs3765606 | GGGGGGTCTGAAAGGAAGAGTCA | SEQ ID NO: 562 | GGGGGGTCTGAAAGGAAGAGTCG | SEQ ID NO: 2928 | AAAACTCAGGCACTTTGCAT | SEQ ID NO: 5294 |
| rs7381988 | CCTGTCAGTGGTGACAAATAACACTTAA | SEQ ID NO: 563 | CCTGTCAGTGGTGACAAATAACACTTAG | SEQ ID NO: 2929 | AAGTATTGCAGTAAGCATCACTT | SEQ ID NO: 5295 |
| rs2071479 | AGACTCAGGGGACAGTCCCATCT | SEQ ID NO: 564 | AGACTCAGGGGACAGTCCCATCC | SEQ ID NO: 2930 | GACAGCAGCAACCTTACTCCT | SEQ ID NO: 5296 |
| rs4986978 | CCGACCCCCGAGAGAGAGATT | SEQ ID NO: 565 | CCGACCCCCGAGAGAGAGATC | SEQ ID NO: 2931 | ACAGAGAAGGGGACAAGATG | SEQ ID NO: 5297 |
| rs2071472 | TTCTTGCATACACACTGGAAAAAAAT | SEQ ID NO: 566 | TTCTTGCATACACACTGGAAAAAAAC | SEQ ID NO: 2932 | ATTGCTCTGTTCTTACCTGGAG | SEQ ID NO: 5298 |
| rs7349863 | CCTGTTTGTTGTCTAACGAACAATCAGT | SEQ ID NO: 567 | CCTGTTTGTTGTCTAACGAACAATCAGC | SEQ ID NO: 2933 | ACACACTCAATTCTAAGTAAAAACC | SEQ ID NO: 5299 |
| rs3093665 | CCCCCTCCTTCAGACACCCTCA | SEQ ID NO: 568 | CCCCCTCCTTCAGACACCCTCC | SEQ ID NO: 2934 | CCTCTTCTGGCTCAAAAAGAG | SEQ ID NO: 5300 |
| rs3132132 | TTCCCTTCTGCATTCAGGGTATGA | SEQ ID NO: 569 | TTCCCTTCTGCATTCAGGGTATGG | SEQ ID NO: 2935 | AGAAATAACTGTCTAGAACTCAATCT | SEQ ID NO: 5301 |
| rs3823318 | AATGGTCATGATGATGCACACAATC | SEQ ID NO: 570 | AATGGTCATGATGATGCACACAATG | SEQ ID NO: 2936 | GGGCTCAGATGTTCAGGTACT | SEQ ID NO: 5302 |
| rs2106072 | TTGACCACGACCTTGGCCCT | SEQ ID NO: 571 | TTGACCACGACCTTGGCCCC | SEQ ID NO: 2937 | GCTCTGCACTCTCTGGAATAA | SEQ ID NO: 5303 |
| rs3130654 | CACACACCTCAATTCCCATTGAGC | SEQ ID NO: 572 | CACACACCTCAATTCCCATTGAGG | SEQ ID NO: 2938 | TGGCTGGTCTGTAAATAGCATA | SEQ ID NO: 5304 |
| rs2857130 | CATATGAATTTTGGGACGGCATATA | SEQ ID NO: 573 | CATATGAATTTTGGGACGGCATATT | SEQ ID NO: 2939 | AGTCCACACCAGGAAGTTCTT | SEQ ID NO: 5305 |
| rs1264300 | CGGTCTCCTCCAGCCCCTCT | SEQ ID NO: 574 | CGGTGTCCTCCAGCCCCTCC | SEQ ID NO: 2940 | AAGTCTCAGAAACCCAAGGAC | SEQ ID NO: 5308 |
| rs909727 | ACTGTGGAGGGAAGGGAGACCTG | SEQ ID NO: 575 | ACTGTGGAGGGAAGGGAGACCTC | SEQ ID NO: 2941 | GTCAGGAGAGCTGAGACCAC | SEQ ID NO: 5307 |
| rs4151670 | GCCACCTCTTGAGGGGTGTCA | SEQ ID NO: 576 | GCCACCTCTTGAGGGGTGTCG | SEQ ID NO: 2942 | ACATGAAGGAGTCTGGGAGAG | SEQ ID NO: 5308 |
| rs1419637 | GCTGGTATAGGCAAATGTTTACAGAAT | SEQ ID NO: 577 | GCTGGTATAGGCAAATGTTTACAGAAA | SEQ ID NO: 2943 | TAATTGTAAAGGGGAACACAGA | SEQ ID NO: 5309 |
| rs2532934 | CTGTCCTGGGCTGGGTCCTCTA | SEQ ID NO: 578 | CTGTCCTGGGCTGGGTCCTCTG | SEQ ID NO: 2944 | GGTGCTAGATGTACAATGCC | SEQ ID NO: 5310 |
| rs1632981 | GCTTTGCAGACACCATTCAATCTTAA | SEQ ID NO: 579 | GCTTTGCAGACACCATTCAATCTTAT | SEQ ID NO: 2945 | AGGTTCCAAAAACAAGAATGG | SEQ ID NO: 5311 |
| rs7383287 | CAGCCTTTGCCTGAATCACAAAA | SEQ ID NO: 550 | CAGCCTTTGCCTGAATCACAAAG | SEQ ID NO: 2946 | CTTCTGGAAAACCAAAACCA | SEQ ID NO: 5312 |
| rs2071477 | TCTCAAAATAACCGTCTCATGAGGTA | SEQ ID NO: 581 | TCTCAAAATAACCGTCTCATGAGGTG | SEQ ID NO: 2947 | TATATTATCTCCACTTTACAGATGC | SEQ ID NO: 5313 |
| rs2071652 | TCCTGAGGTTGTTTTCAGGCTGT | SEQ ID NO: 582 | TCCTGAGGTTGTTTCCAGGCTGC | SEQ ID NO: 2948 | GAGAAATAGCCTGCACAAGG | SEQ ID NO: 5314 |
| rs7756516 | AAGCATGACAAACAAAATCATTTACCTA | SEQ ID NO: 583 | AAGCATGACAAACAAAATCATTTACCTG | SEQ ID NO: 2949 | CTTTAGTGCTTTTTCCCATAATT | SEQ ID NO: 5315 |
| rs2734981 | GCAGAAAGACTCGGGTTTCCCA | SEQ ID NO: 584 | GCAGAAAGAGTCGGGTTTCCCG | SEQ ID NO: 2950 | ACACTCCAGGCTCTCAGTGT | SEQ ID NO: 5316 |
| rs3823339 | GAACCTGGTCAGATCCCACAGAAC | SEQ ID NO: 585 | GAACCTGGTCAGATCCCACAGAAG | SEQ ID NO: 2951 | TGTGGCTAGAGGAGGAATTGT | SEQ ID NO: 5317 |
| rs7770557 | CCCCTGGAAAGGGTTCCAAGTC | SEQ ID NO: 586 | CCCCTGGAAAGGGTTCCAAGTG | SEQ ID NO: 2952 | TTTAGTACCCGACGCTGTCT | SEQ ID NO: 5318 |
| rs1054175 | TGTATAAAAGTGCCCAAAAGCGTTAC | SEQ ID NO: 587 | TGTATAAATGTGCCCAAAAGCGTTAG | SEQ ID NO: 2953 | ACAGGACTCACAAAGCTTCTAA | SEQ ID NO: 5319 |
| rs3131786 | TCTCACCTAGATGGCTGCAGCTG | SEQ ID NO: 588 | TCTCACCTAGATGGCTGCAGCTC | SEQ ID NO: 2954 | CAGAGCTTTCCATTCCTTTG | SEQ ID NO: 5320 |
| rs2844686 | CTCAACCACCCTTGGGGATGT | SEQ ID NO: 589 | CTCAACCACCCTTGGGGATGC | SEQ ID NO: 2955 | TACTCCTATTATCCCATTTTATAGAC | SEQ ID NO: 5321 |
| rs1611653 | GAGACAAGGTTTACTGGATGTGCCA | SEQ ID NO: 590 | GAGACAAGGAACTGGATGTGCCG | SEQ ID NO: 2956 | AGACCACAGGCAATCTAAGG | SEQ ID NO: 5322 |
| rs2242655 | GTGCTAGAGATAGGCTGGTCCCAG | SEQ ID NO: 591 | GTGCTAGAGATAGGCTGGTCCCAC | SEQ ID NO: 2957 | TGAGGGAATCCATTCTTTTG | SEQ ID NO: 5323 |
| rs969891 | ACTCCAAGTCCTGAGGTTGTCCAA | SEQ ID NO: 592 | ACTCCAAGTCCTGAGGTTGTCCAG | SEQ ID NO: 2958 | TACCCCCAGGACATCATTAAAT | SEQ ID NO: 5324 |
| rs2023609 | CAGGTGGAGGGGAGGGATGA | SEQ ID NO: 593 | CAGGTGGAGGGGAGGGATGC | SEQ ID NO: 2959 | GCAGTGTGTTATTGCTCTCC | SEQ ID NO: 5325 |
| rs3129882 | TTCCATAGATTTGGCCCTTAAATAAAA | SEQ ID NO: 594 | TTCCATAGATTTGGCCCTTAAATAAAG | SEQ ID NO: 2960 | GAAGCTTCTGACTCTAAAATGTAAA | SEQ ID NO: 5326 |
| rs3132553 | GGAAGGGTGACTCCAGCGGT | SEQ ID NO: 595 | GGAAGGGTGACTCCAGCGGC | SEQ ID NO: 2961 | TCAGTAGCTACAGTGGCTCC | SEQ ID NO: 5327 |
| rs2233956 | CAGGTGGGTCCAGTGTAGTCACCA | SEQ ID NO: 596 | CAGGTGGGTCCAGTGTAGTCACCG | SEQ ID NO: 2962 | GTCCCTTAATGTGGACATGG | SEQ ID NO: 5328 |
| rs3128930 | GAATATACTGGCACATAAGCCAAGGAA | SEQ ID NO: 597 | GAATATACTGGCACATAAGCCAAGGAG | SEQ ID NO: 2963 | TAAAGATTTCCAGGAAGGAGG | SEQ ID NO: 5329 |
| rs3130560 | CAAATGATTAGCCCCATTTCACAGAA | SEQ ID NO: 598 | CAAATGATTAGCCCCATTTCACAGAC | SEQ ID NO: 2964 | AGGAACCAACACTGAGAGAG | SEQ ID NO: 5330 |
| rs1042141 | CAGGGGTTTCCCAGTTGAGAAGG | SEQ ID NO: 599 | CAGGGGTTTCCCAGTTGAGAAGC | SEQ ID NO: 2965 | GATGGGGGTGTTACTCAATG | SEQ ID NO: 5331 |
| rs2256543 | TTTTGTTGCAGCCACCCATAATA | SEQ ID NO: 600 | TTTTGTTGCAGCCACCCATAATG | SEQ ID NO: 2966 | ATGGCGACTGTCTCAAGACT | SEQ ID NO: 5332 |
| rs2071362 | ATCCCTGCACATGCCCTGGT | SEQ ID NO: 601 | ATCCCTGCACATGCCCTGGC | SEQ ID NO: 2967 | CTCCAGGTGAAGAGCACATAG | SEQ ID NO: 5333 |
| rs4711313 | GCCTCAAGGTGGCTAAGCTCCA | SEQ ID NO: 602 | GCCTCAAGGTGGCTAAGCTCCG | SEQ ID NO: 2968 | TTTGCATCTCTATTATTGAAAA | SEQ ID NO: 5334 |
| rs916568 | CGTTGTATAACAGGCTACCTCTGTGTT | SEQ ID NO: 603 | CGTTGTATAACAGGCTACCTCTGTGTC | SEQ ID NO: 2969 | AAAAAAGAGGGAATGAAGAGTC | SEQ ID NO: 5335 |
| rs4988889 | GCAGTTCCACCACTAATGTGCTTTAT | SEQ ID NO: 604 | GCAGTTCCACCACTAATGTGCTTTAG | SEQ ID NO: 2970 | AGAGTCAACAATTACTGAATTTATT | SEQ ID NO: 5336 |
| rs3132524 | TGAAACACTTCCTTGAGGCTTCAGA | SEQ ID NO: 605 | TGAAACACTTCCTTGAGGCTTCAGG | SEQ ID NO: 2971 | CTACAAAAAGGCCTTGTTTT | SEQ ID NO: 5337 |
| rs1033569 | GCAAACAAATTTCTAAGGACTGATTGTT | SEQ ID NO: 606 | GCAAACAAATTTCTAAGGACTGATTGTC | SEQ ID NO: 2972 | TTTTGTGTGTGTAATTTTGTTTG | SEQ ID NO: 5338 |
| rs4713242 | GGCTAGTCAAGTAAAGCAGTGGGAGT | SEQ ID NO: 607 | GGCTAGTCAAGTAAAGCAGTGGGAGC | SEQ ID NO: 2973 | GAGAAGGAAAAAAGAAATCTGTAA | SEQ ID NO: 5339 |
| rs3095334 | CAGAGGACACGCCATAGCTGGG | SEQ ID NO: 608 | CAGAGGACACGCCATAGCTGGC | SEQ ID NO: 2974 | GACATCACTGTCGAGGTGTG | SEQ ID NO: 5340 |
| rs2844666 | TTTGCTAACACACACAGAAAAGAAATGT | SEQ ID NO: 609 | TTTGCTAACACACACAGAAAAGAAATGG | SEQ ID NO: 2975 | TAATATGTGTTGGTGATGTGTTC | SEQ ID NO: 5341 |
| rs2517671 | TCTTCCCTAGTGTGCAAGTCCCTT | SEQ ID NO: 610 | TCTTCCCTAGTGTGCAAGTCCCTC | SEQ ID NO: 2976 | CCCAATTCCTCATTAGCTGAG | SEQ ID NO: 5342 |
| rs6903130 | CAGGAAATTCTTCTTCACAGCTTTTGT | SEQ ID NO: 611 | CAGGAAATTCTTCTTCACAGCTTTTGC | SEQ ID NO: 2977 | CTCTATCTTCAAAACTAAATGTGAC | SEQ ID NO: 5343 |
| rs2179919 | CCTCTCCCGGTGTCTGATTCCT | SEQ ID NO: 612 | CCTCTGCCGGTGTCTGATTCCC | SEQ ID NO: 2978 | CTCTGTAACATGAAATAAATAAGAACC | SEQ ID NO: 5344 |
| rs2233984 | TGGGGGAATATTCATCTATACCCAGA | SEQ ID NO: 613 | TGGGGGAATATTCATCTATACCCAGG | SEQ ID NO: 2979 | ATCAATAACCCATTTCCTCC | SEQ ID NO: 5345 |
| rs3117574 | GCCCGGCCCTGATAGCCA | SEQ ID NO: 614 | GCCCGGCCCTGATAGCCG | SEQ ID NO: 2980 | TGAGGTTTTTTTGTCATTGTTC | SEQ ID NO: 5346 |
| rs356969 | CAGCCTCCCCAGGGTCTCAC | SEQ ID NO: 615 | CAGCCTCCCCAGGGTCTCAG | SEQ ID NO: 2981 | TTTACAAGCCGTGAGAGACAC | SEQ ID NO: 5347 |
| rs3128972 | CCATGTCACTGAATCCAACAGTACATTAT | SEQ ID NO: 616 | CCATGTCACTGAATCCAACAGTACATTAC | SEQ ID NO: 2982 | AAAACAATACGTTTTGACCAATT | SEQ ID NO: 5348 |
| rs4084093 | CATTGCTTTGTCCCAGCAAGTTGT | SEQ ID NO: 617 | CATTGCTTTGTCCCAGCAAGTTGC | SEQ ID NO: 2983 | GACAAATCTTGAATATTCTAAAATAGG | SEQ ID NO: 5349 |
| rs805262 | GGGCTGTAGGGGGCGACCA | SEQ ID NO: 618 | GGGCTGTAGGGGGCGACCG | SEQ ID NO: 2984 | GTTTAGGGAAGCATGAGAAAC | SEQ ID NO: 5350 |
| rs2269555 | CCTGGTTTGGGTCAGGTATTGCA | SEQ ID NO: 619 | CCTGGTTTGGGTCAGGTATTGCG | SEQ ID NO: 2985 | AGATCTAATCTGCCCCAACC | SEQ ID NO: 5351 |
| rs3095298 | TCCTTCAAAAGCGGGCTGTA | SEQ ID NO: 620 | TTTCCTTCAAAAGCGGGCTGTG | SEQ ID NO: 2986 | TTCTCTTCTACCTTCCAGCT | SEQ ID NO: 5352 |
| rs189865 | AAAGGGAAATGTGAACTATCTTGCTT | SEQ ID NO: 621 | AAAGGGAAATGTGAACTATCTTGCTC | SEQ ID NO: 2987 | GTTGATGGGAGTGTAAACTGTT | SEQ ID NO: 5353 |
| rs3130991 | TTTGATCATTACAAGAACGGTATGAAAA | SEQ ID NO: 622 | TTTGATCATTACAAGAACGGTATGAAAG | SEQ ID NO: 2988 | AGATTTGCTATTTCCACTCTACA | SEQ ID NO: 5354 |
| rs1061235 | CCTTTGCAGAAACAAAGTCAGGGTA | SEQ ID NO: 623 | CCTTTGCAGAAACAAAGTCAGGGTT | SEQ ID NO: 2989 | TTCAAGTCACAAAGGGAAGG | SEQ ID NO: 5355 |
| rs3823421 | GGGAGAGGACGGCCATTCCA | SEQ ID NO: 624 | GGGAGAGGACGGCCATTCCG | SEQ ID NO: 2990 | ACATAGGGAACAGGACACAC | SEQ ID NO: 6356 |
| rs4079877 | TTTTTAACATTGTATTAGGCTGTGCCT | SEQ ID NO: 625 | TTTTTAACATTGTATTAGGCTGTGCCG | SEQ ID NO: 2991 | CACTGCTGTAAAGAAATACCTG | SEQ ID NO: 5357 |
| rs909968 | TGTTACCTAGCCCCTTTGCCACA | SEQ ID NO: 626 | TGTTACCTAGCCCCTTTGCCACG | SEQ ID NO: 2992 | AATATGGGGGCTTATCTCCAC | SEQ ID NO: 5358 |
| rs3218807 | GTGGGGAAGCCGAAAGGAGA | SEQ ID NO: 627 | GTGGGGAAGCCGAAAGGAGG | SEQ ID NO: 2993 | GAGCTGGCTTTTAATTGAGC | SEQ ID NO: 5359 |
| rs760293 | GCATGGAAGGGCAGGTCTGAAA | SEQ ID NO: 628 | GCATGGAAGGGCAGGTCTGAAG | SEQ ID NO: 2994 | TCTCCCTTGCTCTCTATCCAG | SEQ ID NO: 5360 |
| rs5026743 | CTCTGTCACCCATGCTGTAGTTCA | SEQ ID NO: 629 | CTCTGTCACCCATGCTGTAGTTCC | SEQ ID NO: 2995 | TGTTATGATCTAGGCTTACTGCA | SEQ ID NO: 5361 |
| rs2213586 | GGGGTTTCAGATTCACTCTACTGAAGAT | SEQ ID NO: 630 | GGGGTTTCAGATTCACTCTACTGAAGAC | SEQ ID NO: 2996 | GAGTTATATCATTGCTCAGTAGAGA | SEQ ID NO: 5362 |
| rs3132709 | GATTTCCAAGGACCCAGACCCA | SEQ ID NO: 631 | GAACCAAGGACCCAGACCCG | SEQ ID NO: 2997 | CAGGGCAGAAGGTTTGAGTA | SEQ ID NO: 5363 |
| rs805267 | CAGCTCCACTGCAATGGATTCCT | SEQ ID NO: 632 | CAGCTCCACTGCAATGGATTCCC | SEQ ID NO: 2998 | ACCATTGCTCAAGTCTCCAG | SEQ ID NO: 5364 |
| rs391755 | TGTTACAGACAATTCAGACTGCAAAAA | SEQ ID NO: 633 | TGTTACAGACAATTCAGACTGCAAAAT | SEQ ID NO: 2999 | TAGGGTAGACTATGTTCATTTAACA | SEQ ID NO: 5365 |
| rs3765604 | AGGGTAGAAGCCCAGAACCCAGG | SEQ ID NO: 634 | AGGGTAGAAGCCCAGAACCCAGC | SEQ ID NO: 3000 | CCTCGTTATGCCTCATGTTC | SEQ ID NO: 5366 |
| rs1265087 | CCCCAGAGTCAGTTTCTATCATATCATCA | SEQ ID NO: 635 | CCCCAGAGTCAGTTTCTATCATATCATCG | SEQ ID NO: 3001 | ACTGTACTTTCTCTTCAAGCACTT | SEQ ID NO: 5367 |
| rs516535 | AGAAGCAGCAGCACCAGGGAAA | SEQ ID NO: 636 | AGAAGCAGCAGCACCAGGGAAG | SEQ ID NO: 3002 | GGATTCGAAAACCCTCTCTCT | SEQ ID NO: 5368 |
| rs1632883 | GGTGAGGATGCAAGATGCAAGTT | SEQ ID NO: 637 | GGTGAGGATGCAAGATGCAAGTG | SEQ ID NO: 3003 | GTCTTTTACTTTGTGTGTGTGT | SEQ ID NO: 5369 |
| rs7740076 | AAAATATGTGGTCAAAGAAAAGGGGA | SEQ ID NO: 638 | AAAATATGTGGTCAAAGAAAAGGGGG | SEQ ID NO: 3004 | AATATGAGTTATCACAAAAACATTT | SEQ ID NO: 5370 |
| rs10885 | ACCACCTCCTGCCCCACCTT | SEQ ID NO: 639 | AGCACCTCCTGCCCCACCTC | SEQ ID NO: 3005 | CCTTTCTCTGTTACCTGTGG | SEQ ID NO: 5371 |
| rs1042149 | CCGCTTTTGAAGGAAAATGAGGA | SEQ ID NO: 640 | CCGCTTTTGAAGGAAAATGAGGG | SEQ ID NO: 3006 | CACAGAGACCTCTAGAGGCGTA | SEQ ID NO: 5372 |
| rs3129859 | AGAAGTGTGGAGAAGGAATCACTAGAGC | SEQ ID NO: 641 | AGAAGTGTGGAGAAGGAATCACTAGAGG | SEQ ID NO: 3007 | TCCTGATAAGAAAGATGGTAGAA | SEQ ID NO: 5373 |
| rs362546 | GGCTGGACTGTTCCCACACTCA | SEQ ID NO: 642 | GGCTGGACTGTTCCCACACTCG | SEQ ID NO: 3008 | CTGAGCAATCAATTCTGGCT | SEQ ID NO: 5374 |
| rs1633057 | GCCCCAGAACCCCTTCCACA | SEQ ID NO: 643 | GCCCCAGAACCCCTTCCACG | SEQ ID NO: 3009 | AATCTCAATATCCAGGCCTG | SEQ ID NO: 5375 |
| rs3807032 | GTAGCCCCCTGTGACCCCCG | SEQ ID NO: 644 | GTAGCCCCCTGTGACCCCCC | SEQ ID NO: 3010 | AAGAGCCCCAATTTTACCTT | SEQ ID NO: 5376 |
| rs3130212 | ACTAGGGTGAGGCCTCAGAAGACC | SEQ ID NO: 645 | ACTAGGGTGAGGCCTCAGAAGACG | SEQ ID NO: 3011 | GCTAAGCAGGTTGAAGTCGT | SEQ ID NO: 5377 |
| rs423639 | AAATGAGGGCAGTCCCACTCCA | SEQ ID NO: 646 | AAATGAGGGCAGTCCCACTCCG | SEQ ID NO: 3012 | GTTGGCCTCATGAAGACATC | SEQ ID NO: 5378 |
| rs3135000 | GGAATCTGTGCTTGGTCAGTGGAA | SEQ ID NO: 647 | GGAATCTGTGCTTGGTCAGTGGAG | SEQ ID NO: 3013 | TGAATGTGAACATAGGAGCC | SEQ ID NO: 5379 |
| rs1264620 | TGGCACTATCTGTACCAACATACAACT | SEQ ID NO: 648 | TGGCACTATCTGTACCATCATACAACC | SEQ ID NO: 3014 | TCTCACATTAAAGCTATTTTTCTTG | SEQ ID NO: 5380 |
| rs1264703 | CTGAAGGCAGGCCAACGTGG | SEQ ID NO: 649 | CTGAAGGCAGGCCAACGTGC | SEQ ID NO: 3015 | GTTCAGGCTTTATCCTTTAGAGA | SEQ ID NO: 5381 |
| rs1465651 | GGAAGGGGTTAACAGAAGAAGTCAGTGA | SEQ ID NO: 650 | GGAAGGGGTTAACAGAAGAAGTCAGTGG | SEQ ID NO: 3016 | AGGAACTTAATCTCTACATTTTACCA | SEQ ID NO: 5382 |
| rs7194 | GGATTGTAATATTGCCAGCTTTGTAAAGT | SEQ ID NO: 651 | GGATTGTAATATTGCCAGCTTTGTAAAGC | SEQ ID NO: 3017 | ATTAAAGCAGAAGTTTCTTCAGTG | SEQ ID NO: 5383 |
| rs213210 | CATCGGGACCTAGGTGTGTTCTCA | SEQ ID NO: 652 | CATCGGGACCTAGGTGTGTTCTCG | SEQ ID NO: 3018 | GACTAGAAGGCTAAAGCGGC | SEQ ID NO: 5384 |
| rs2256028 | GAGGGTTTCCCTGGACACATCTT | SEQ ID NO: 653 | GAGGGTTTCCCTGGACACATCTG | SEQ ID NO: 3019 | GAGGTGAGGCAACTCTAGCA | SEQ ID NO: 5385 |
| rs762815 | GGGACAGAGCGCGTGCGG | SEQ ID NO: 654 | GGGACAGAGCGCGTGCGC | SEQ ID NO: 3020 | GTGTGGCCAGATACATCTATAAC | SEQ ID NO: 5386 |
| rs3868542 | ATGAGGCCCTGCAGGGAAACA | SEQ ID NO: 655 | ATGAGGCCCTGCAGGGAAACG | SEQ ID NO: 3021 | GAGATTCCCTTCCCATTGTT | SEQ ID NO: 6387 |
| rs5021449 | CATTCAACAAGGACAGAGTGATTCTAAAT | SEQ ID NO: 656 | CATTCAACAAGGACAGAGTGATTCTAAAC | SEQ ID NO: 3022 | AAACCTCCATTACTAACTTGTTGT | SEQ ID NO: 5388 |
| rs1632880 | CAGGTGAGAAGAGGAGGAGGCAGC | SEQ ID NO: 657 | CAGGTGAGAAGAGGAGGAGGCAGG | SEQ ID NO: 3023 | CTGCTATCACACAATGAGGG | SEQ ID NO: 5389 |
| rs7774954 | CAGGGGCAGGTGGGCATTAA | SEQ ID NO: 658 | CAGGGGCAGGTGGGCATTAC | SEQ ID NO: 3024 | GAAGAGTGATGACCAATCCC | SEQ ID NO: 5390 |
| rs4713520 | AATACCCTACCTGGTTGTTGTGAGT | SEQ ID NO: 659 | AATACCCTACCTGGTTGTTGTGAGC | SEQ ID NO: 3025 | TCAAATGATTTAATACATAAAGTGC | SEQ ID NO: 5391 |
| rs6456895 | CCCTCGTTCTCTAATCAATTATCTTTGT | SEQ ID NO: 660 | CCCTCGTTCTCTAATCAATTATCTTTGC | SEQ ID NO: 3026 | TACTGTGGATTCATTGTAGCTACT | SEQ ID NO: 5392 |
| rs463302 | AACAAAGGCAAAAACGCGGACG | SEQ ID NO: 661 | AACAAAGGCAAAAACGCGGACC | SEQ ID NO: 3027 | TGGTTATGAAGGGTGTGGTC | SEQ ID NO: 5393 |
| rs1265100 | GTTAAAGCAGCAGCCTAGATTCAGAA | SEQ ID NO: 662 | GTTAAAGCAGCAGCCTAGATTCAGAG | SEQ ID NO: 3028 | TAAGAAAACATGATTTTTATTTTTC | SEQ ID NO: 5394 |
| rs3828875 | GCCAGGGGCTCTCCTCTCCT | SEQ ID NO: 663 | GCCAGGGGCTCTCCTCTCCC | SEQ ID NO: 3029 | CCAATTCTGCTAGAGTTGCCT | SEQ ID NO: 5395 |
| rs6917517 | CCTGCTCTGCTGGGGTCCAA | SEQ ID NO: 664 | CCTGCTCTGCTGGGGTCCAG | SEQ ID NO: 3030 | GTGAGAGTGTGAGCAACATG | SEQ ID NO: 5396 |
| rs3888777 | CACCAGGGGAAGCTTTCACAAA | SEQ ID NO: 665 | CACCAGGGGAAGCTTTCACAAG | SEQ ID NO: 3031 | AACAGAGAAACCCTCGAAGG | SEQ ID NO: 5397 |
| rs7769979 | GGTGGAATTGTGGGGACAAT | SEQ ID NO: 666 | GGTGGAATTGTTTGGGGACAAC | SEQ ID NO: 3032 | ATAGTGACTGATGTTTCAAATATATTC | SEQ ID NO: 5398 |
| rs3129931 | TTCTTTTGATGGTCTTAAGAAGGAGAAT | SEQ ID NO: 667 | TTCTTTTGATGGTCTTAAGAAGGAGAAC | SEQ ID NO: 3033 | AAAACCTAACTGAGAAAAATGC | SEQ ID NO: 5399 |
| rs3868086 | GCTCAGACTTTGACTTCCCCGAG | SEQ ID NO: 668 | GCTCAGACTTTGACTTCCCCGAC | SEQ ID NO: 3034 | TGATGAGCAATTTTCCATG | SEQ ID NO: 5400 |
| rs7773068 | GGCAAATGAACTAAATCTTTCCTGATAGT | SEQ ID NO: 669 | GGCAAATGAACTAAATCTTTCCTGATAGC | SEQ ID NO: 3035 | CTCCAGAATTTCCCCTATTAATA | SEQ ID NO: 5401 |
| rs3778638 | CCTGCTGCAGGCGGACACA | SEQ ID NO: 670 | CCTGCTGCAGGCGGACACG | SEQ ID NO: 3036 | TGCCTGGGTATTTAACATGAG | SEQ ID NO: 5402 |
| rs3130643 | AGAGATCTGGGGATTTCGGCTCT | SEQ ID NO: 671 | AGAGATCTGGGGATTTCGGCTCA | SEQ ID NO: 3037 | TGCTGACACTTCCTTCATG | SEQ ID NO: 5403 |
| rs3885028 | GCCAGGCTTGTCCACCCCT | SEQ ID NO: 672 | GCCAGGCTTGTCCACCCCA | SEQ ID NO: 3038 | GGGATCTCTCCTACCTGACTG | SEQ ID NO: 5404 |
| rs3757327 | CTTCAAGGAAGACTGGGAAATGGT | SEQ ID NO: 673 | CTTCAAGGAAGACTGGGAAATGGC | SEQ ID NO: 3039 | TAATAAAAATAGATACAATGTTATGGC | SEQ ID NO: 6405 |
| rs29225 | ACAGAGACACCCTCAAAGGACGAA | SEQ ID NO: 674 | ACAGAGACACCCTCAAAGGACGAG | SEQ ID NO: 3040 | AGTTCATTGCCCGGTAGATT | SEQ ID NO: 5406 |
| rs885937 | CCCTGAAGGCACAGGTACCCT | SEQ ID NO: 675 | CCCTGAAGGCACAGGTAACCCA | SEQ ID NO: 3041 | CACCCCATCTCCAACTATGA | SEQ ID NO: 5407 |
| rs3129702 | AGACTTGGGAGGTGATGTCATATAAA | SEQ ID NO: 676 | AGACTTGGGAGGTGATGTCATATAAC | SEQ ID NO: 3042 | GTTATTTAAAGCCTTGAGTCTGAA | SEQ ID NO: 5408 |
| rs3128968 | TGAGGGTGTCAGGAGATGAGGAAA | SEQ ID NO: 677 | TGAGGGTGTCAGGAGATGAGGAAT | SEQ ID NO: 3043 | TCCCTGGAGTCACAGAAAGA | SEQ ID NO: 5409 |
| rs4713327 | CCCTCATGGACCCCGGAT | SEQ ID NO: 678 | CCCTCATGGACCCCGGAC | SEQ ID NO: 3044 | TTTTGCAAGTCTGTCCTTACC | SEQ ID NO: 5410 |
| rs987870 | CACCTCCTTCAAAGCATCTGATTCTAT | SEQ ID NO: 679 | CACCTCCTTCAAAGCATCTGATTCTAC | SEQ ID NO: 3045 | TTGAAAGAGTGAATATTTTTACAAA | SEQ ID NO: 5411 |
| rs7772410 | CCTCCCACTTAAGAGTGAGGACACG | SEQ ID NO: 660 | CCTCCCACTTAAGAGTGAGGACACC | SEQ ID NO: 3046 | GGTGTTAGGTTTTCTGTTCC | SEQ ID NO: 5412 |
| rs3998790 | CTGTCTGTCACCACCCCCATTTT | SEQ ID NO: 681 | CTGTCTGTCACCACCCCCATTTC | SEQ ID NO: 3047 | CTGGTGACATCCCTCTTTC | SEQ ID NO: 5413 |
| rs733841 | CTGTCTGTCACCACCCCCATTTT | SEQ ID NO: 682 | CTGTCTGTCACCACCCCCATTTC | SEQ ID NO: 3048 | CTGGTGACATCCCTCTTTC | SEQ ID NO: 5414 |
| rs6916716 | GACCAGCCCCTTGTCAGGGA | SEQ ID NO: 683 | GACCAGCCCCTTGTCAGGGC | SEQ ID NO: 3049 | GCTGTCATCCCTGTTTTCAT | SEQ ID NO: 5415 |
| rs2395313 | TTGAGTTGCTTACTATGTTCTAGGCACT | SEQ ID NO: 684 | TTGAGTTGCTTACTATGTTCTAGGCACG | SEQ ID NO: 3050 | TTCTAAGTGCTTCTCATGTGTTC | SEQ ID NO: 5416 |
| rs7744001 | CAAGTGTTGGTGCCTCTTTGTGCA | SEQ ID NO: 685 | CAAGTGTTGGTGCCTCTTTGTGCG | SEQ ID NO: 3051 | CAGTGTCCCTGTCTGAGGAC | SEQ ID NO: 5417 |
| rs3757329 | GAAAGGAAGCAGGGATGAAGTGGT | SEQ ID NO: 686 | GAAAGGAAGCAGGGATGAAGTGGG | SEQ ID NO: 3052 | CACTTGAGAAGGGGTTCAG | SEQ ID NO: 5418 |
| rs6933135 | GCCTTGGACTGAGCCAGGCTA | SEQ ID NO: 687 | GCCTTGGACTGAGCCAGGCTG | SEQ ID NO: 3053 | TGTCTTCCTTGGTTCTCCAG | SEQ ID NO: .5419 |
| rs4713217 | GCATGAATCCTTAATATTGAAGAGACCAA | SEQ ID NO: 688 | GCATGAATCCTTAATATTGAAGAGACCAG | SEQ ID NO: 3054 | AGCTAAGCTTCTATACAACTTCTGA | SEQ ID NO: 5420 |
| rs3130198 | TTGGGAACGCACAGTTTTTCACT | SEQ ID NO: 689 | TTGGGAACGCACAGTTTTTCACC | SEQ ID NO: 3055 | GTCTGGTGGAGTTTGCAGT | SEQ ID NO: 5421 |
| rs5027459 | TGTTGCACAGGGACCAGGTATGA | SEQ ID NO: 690 | TGTTGCACAGGGACCAGGTATGG | SEQ ID NO: 3056 | TTGGGGCAGTTTAGAAGTG | SEQ ID NO: 5422 |
| rs2747430 | CGCTTGTTAGCACCCACTGAATA | SEQ ID NO: 691 | CGCTTGTTAGCACCCACTGAATG | SEQ ID NO: 3057 | GCTTATGTGCTCAGAAACGGT | SEQ ID NO: 5423 |
| rs4248158 | GGAGTGAAAGAGCCTCCAGGACT | SEQ ID NO: 692 | GGAGTGAAAGAGCCTCCAGGACC | SEQ ID NO: 3058 | CCAGGTATGGAATACAGGG | SEQ ID NO: 5424 |
| rs2301227 | CTAGGGTGATGTAGGGGATGCACT | SEQ ID NO: 693 | CTAGGGTGATGTAGGGGATGCACC | SEQ ID NO: 3059 | GGCTTAGGTGCAAAATTTG | SEQ ID NO: 5425 |
| rs3668 | GGGTGGCTTACTCCAGGCAACT | SEQ ID NO: 694 | GGGTGGCTTACTCCAGGCAACC | SEQ ID NO: 3060 | TTAGTAGGTAACACTTAAGAAGAAAAA | SEQ ID NO: 5426 |
| rs1233426 | CAAGGTCCGGCAGCTCTTCATA | SEQ ID NO: 695 | CAAGGTCCGGCAGCTCTTCATG | SEQ ID NO: 3061 | GGATGGACTCATCTCAGCAG | SEQ ID NO: 5427 |
| rs3094093 | GGTAAGTGCTGGCCTTCCTTCCTA | SEQ ID NO: 696 | GGTAAGTGCTGGCCTTCCTTCCTT | SEQ ID NO: 3062 | ACCTCTGAAATCAACCAGG | SEQ ID NO: 5428 |
| rs422951 | AGTGAGGGGGACCCTGGGT | SEQ ID NO: 697 | AGTGAGGGGGACCCTGGGC | SEQ ID NO: 3063 | TCACACTCATCCACATCTTC | SEQ ID NO: 5429 |
| rs909729 | TCTACAATGGCATTCAATAAAGTGCAA | SEQ ID NO: 698 | TCTACAATGGCATTCAATAAAGTGCAT | SEQ ID NO: 3064 | TGTTCCTGGTTAAAAAAAAAA | SEQ ID NO: 5430 |
| rs2534673 | GACAGACAACGCGTGGTTTTTCTC | SEQ ID NO: 699 | GACAGACAACGCGTGGTTTTTCTG | SEQ ID NO: 3065 | CAATACACTCCCTCAACCG | SEQ ID NO: 5431 |
| rs6928482 | AGGCCATGACCCTGAAAGCAGA | SEQ ID NO: 700 | AGGCCATGACCCTGAAAGCAGG | SEQ ID NO: 3066 | ATCCCATCTTCCTTTCTCC | SEQ ID NO: 5432 |
| rs707938 | GGCCCTTGTGGCAGCAGT | SEQ ID NO: 701 | GGCCCTTGTGGCAGCAGC | SEQ ID NO: 3067 | GTAGCTGAACAAGGCTCAGAA | SEQ ID NO: 5433 |
| rs2844521 | GGAGAGCTAGGTCCATCTCCCTCT | SEQ ID NO: 702 | GGAGAGCTAGGTCCATCTCCCTCC | SEQ ID NO: 3068 | AGTCTCTCACTAGGCTTATGATCT | SEQ ID NO: 5434 |
| rs3868075 | CCAGAACTCTACTGAAATCAAGTCTGGAT | SEQ ID NO: 703 | CCAGAACTCTACTGAAATCAAGTCTGGAC | SEQ ID NO: 3069 | AAAGTCAATAATATTCTTCTGACCG | SEQ ID NO: 5435 |
| rs7766843 | CAAGAGAAGAATGACAGCAAGCA | SEQ ID NO: 704 | CAAGAGAAGAATGACAGCAAGCG | SEQ ID NO: 3070 | AAGGGTTTTTCCCTTTATAAAAC | SEQ ID NO: 5436 |
| rs4151651 | CGATGCTGAGGATGGGCACA | SEQ ID NO: 705 | CGATGCTGAGGATGGGCACG | SEQ ID NO: 3071 | CCCAGGTTTGAAGACAGAGA | SEQ ID NO: 5437 |
| rs2394609 | CCCATATGAATTGATCAGAGAAGAATT | SEQ ID NO: 706 | CCCATATGAATTGATCAGAGAAGAATG | SEQ ID NO: 3072 | TGTTCTTCATAGACTACAAAATTCC | SEQ ID NO: 5438 |
| rs2239805 | CTGTCTTCTCCTACTATCCAGCTTCCT | SEQ ID NO: 707 | CTGTCTTCTCCTACTATCCAGCTTCCG | SEQ ID NO: 3073 | CTTTTTTTAATCTGTAATTCTCTCAA | SEQ ID NO: 5439 |
| rs5007260 | ACCTGTTACACTGCCTCCCACTTAT | SEQ ID NO: 708 | ACCTGTTACACTGCCTCCCACTTAC | SEQ ID NO: 3074 | TTTATATCCCACTGCGCAGT | SEQ ID NO: 5440 |
| rs2073044 | CCATCTAGTTATCCTTTCCTCCCCA | SEQ ID NO: 709 | CCATCTAGTTATCCTTTCCTCCCCG | SEQ ID NO: 3075 | TGAGTTATTTAACACTAGAAAAAAAA | SEQ ID NO: 5441 |
| rs3765608 | TCTCTGAGCAGGGTAGCAGGGAG | SEQ ID NO: 710 | TCTCTGAGCAGGGTAGCAGGGAC | SEQ ID NO: 3076 | TCTGGTCCTGATCTGAGTG | SEQ ID NO: 5442 |
| rs769176 | AAAAACCGATGCCCCACTTAGGA | SEQ ID NO: 711 | AAAAACCGATGCCCCACTTAGGG | SEQ ID NO: 3077 | GTCCCATTTAGGGTGAGAC | SEQ ID NO: 5443 |
| rs7773694 | GGATACAGGGGAAAAAAGATAGAAATGTA | SEQ ID NO: 712 | GGATACAGGGGAAAAAAGATAGAAATGTG | SEQ ID NO: 3078 | TATTTACTACACAGCAAAGAGGAT | SEQ ID NO: 5444 |
| rs3126935 | TCTCTAGACCCCCCTGCATGTTA | SEQ ID NO: 713 | TCTCTAGACCCCCCTGCATGTTG | SEQ ID NO: 3079 | CGGTGTTCTCTCTCTGTGG | SEQ ID NO: 5445 |
| rs2853950 | TCTCTCCCTTCCCTGATTCCAGTA | SEQ ID NO: 714 | TCTCTCCCTTCCCTGATTCCAGTG | SEQ ID NO: 3080 | TCTTCGTGCTGACTCCAAT | SEQ ID NO: 5446 |
| rs494620 | GCTGGGCGTGCTGGCATAT | SEQ ID NO: 715 | GCTGGGCGTGCTGGCATAC | SEQ ID NO: 3081 | GCATCTACTACTGCTGGGAG | SEQ ID NO: 5447 |
| rs1633089 | TACAACCTCACGGTGCTGTCCCA | SEQ ID NO: 716 | TACAACCTCACGGTGCTGTCCCG | SEQ ID NO: 3082 | GATGGATCTGTGCAGTCAG | SEQ ID NO: 5448 |
| rs2267642 | TCACCCAAACTCACTTCCCAAACT | SEQ ID NO: 717 | TCACCCAAACTCACTTCCCAAACC | SEQ ID NO: 3083 | CATCTCCTCACAAAGGCAG | SEQ ID NO: 5449 |
| rs2259571 | CAACCCCTTCCTCAGTCCCCT | SEQ ID NO: 718 | CAACCCCTTCCTCAGTCCCCG | SEQ ID NO: 3084 | CTGAAAACCCTCCAGTCAG | SEQ ID NO: 5450 |
| rs1557608 | CAGGGTCTCTCCTCAGGAGAGAAT | SEQ ID NO: 719 | CAGGGTCTCTCCTCAGGAGAGAAG | SEQ ID NO: 3085 | CAGTTATACTGAAGATGCCTTCC | SEQ ID NO: 5451 |
| rs2530708 | CGCAGTCTGATTTTTACTGTCTCACATAGT | SEQ ID NO: 720 | CGCAGTCTGATTTTTACTGTCTCACATAGC | SEQ ID NO: 3086 | TAGTATAAAGACCAGGGAGAAGG | SEQ ID NO: 5452 |
| rs7769930 | TCCCACCAGCACCCAATCCT | SEQ ID NO: 721 | TCCCACCAGCACCCAATCCG | SEQ ID NO: 3087 | GGATATTTATTCTCTTTGTCTCACA | SEQ ID NO: 5453 |
| rs2097274 | AAAGTCACATTCAAATGCACAAATGT | SEQ ID NO: 722 | AAAGTCACATTCAAATGCACAAATGC | SEQ ID NO: 3088 | CTAAGAAATTTTTAGCAATAAGATTT | SEQ ID NO: 5454 |
| rs422878 | CGCAAAGAAATAGCACTCAGACATAAATTT | SEQ ID NO: 723 | CGCAAAGAAATAGCACTCAGACATAAATTC | SEQ ID NO: 3089 | ATTTTCTCAGCAAGGAATTTTTA | SEQ ID NO: 5455 |
| rs6457643 | AATGTGAAAAAATGTTTCATTTCCAGA | SEQ ID NO: 724 | AATGTGAAAAAATGTTTCATTTCCAGC | SEQ ID NO: 3090 | TTTATTTCTTTGTATAGATCCAGGT | SEQ ID NO: 5456 |
| rs7381617 | CATGCTCATTGCTGATACATAGAAAAA | SEQ ID NO: 725 | CATGCTCATTGCTGATACATAGAAAAG | SEQ ID NO: 3091 | GATTGGCTTTTACATATTAACTTT | SEQ ID NO: 5457 |
| rs3129270 | AAAAAAAGTGATGAGACATGACTTGGTA | SEQ ID NO: 726 | AAAAAAAGTGATGAGACATGACTTGGTG | SEQ ID NO: 3092 | ATATTCTTAACAGAAAACAATCATG | SEQ ID NO: 5458 |
| rs1632914 | ACTGGGCAGCAGCCCAGGGA | SEQ ID NO: 727 | ACTGGGCAGCAGCCCAGGGG | SEQ ID NO: 3093 | GCTTTACAGGTTTGTGTTTTACA | SEQ ID NO: 5459 |
| rs3129808 | TTTCCATGTTAATCAATCAAGTCCATA | SEQ ID NO: 728 | TTTGCATGTTAATCAATCAAGTCCATC | SEQ ID NO: 3094 | ATTGTTTATATGTGTAGCTTTCTCTC | SEQ ID NO: 5460 |
| rs4713604 | TGCAAAGCTAGGAGTTCATGAAGTGG | SEQ ID NO: 729 | TGCAAAGCTAGGAGTTCATGAAGTGC | SEQ ID NO: 3095 | TTTCAATAATAGAGATGCAAAG | SEQ ID NO: 5461 |
| rs241436 | ATAGTCCTCTGCCCCTGTCCCT | SEQ ID NO: 730 | ATAGTCCTCTGCCCCTGTCCCC | SEQ ID NO: 3096 | CTGCACAGGTGGTTTCAGTT | SEQ ID NO: 5462 |
| rs3132555 | TTGTCTTCCTCCTCTGTGGGAGG | SEQ ID NO: 731 | TTGTCTTCCTCCTCTGTGGGAGC | SEQ ID NO: 3097 | GCTGGAAGGTAGAAGAGAAA | SEQ ID NO: 5483 |
| rs2517461 | ACACTTGAAATATGGCAAGTACGACTA | SEQ ID NO: 732 | ACACTTGAAATATGGCAAGTACGACTG | SEQ ID NO: 3098 | GAAACTGAACGTTTTTATTTTATT | SEQ ID NO: 5464 |
| rs5021448 | GCAGCCCCCAGGTATCAGGAT | SEQ ID NO: 733 | GCAGCCCCCAGGTATCAGGAC | SEQ ID NO: 3099 | CTTTTTTATTTTACCTTTTTTTAGTC | SEQ ID NO: 5465 |
| rs4122198 | GAGAAGCTGCAGTGAGTTTTATGTTCTA | SEQ ID NO: 734 | GAGAAGCTGCAGTGAGTTTTATGTTCTG | SEQ ID NO: 3100 | ACCCAGAGTCAAAAACTGTTATAT | SEQ ID NO: 5466 |
| rs2227134 | TTCAGCTTTGACAATATTGGGGGA | SEQ ID NO: 735 | TTCAGCAAGACAATATTGGGGGG | SEQ ID NO: 3101 | AAAAAAAGATGTAGATACTTAATTTTG | SEQ ID NO: 5467 |
| rs4713605 | TTGCCAAGGTCACCAAATCTTTAA | SEQ ID NO: 736 | TTGCCAAGGTCACCAAATCTTTAT | SEQ ID NO: 3102 | TTTGTGGAGTTTTCTGCTG | SEQ ID NO: 5468 |
| rs1265158 | AGGCCGAGAAGTGAACACAGCTC | SEQ ID NO: 737 | AGGCCGAGAAGTGAACACAGCTG | SEQ ID NO: 3103 | AACCCCACTGCCTTGTAGAC | SEQ ID NO: 5469 |
| rs3135382 | ACTCTGAAATCGCGGTGCAGTA | SEQ ID NO: 738 | ACTCTGAAATCGCGGTGCAGTC | SEQ ID NO: 3104 | TAAAATCTTGGAGGCGGTT | SEQ ID NO: 5470 |
| rs3129701 | AGCGGCATCTCAGATCCCACA | SEQ ID NO: 739 | AGCGGCATCTCAGATCCCACG | SEQ ID NO: 3105 | CTCCCATAGTGACTGCCTG | SEQ ID NO: 5471 |
| rs2244548 | AAGACTTGGGAACACAACTCAAGG | SEQ ID NO: 740 | TTTGACTTGGGAACACTTTCTCAAGC | SEQ ID NO: 3106 | ATGATGTATTAGTCCATTTCATGTT | SEQ ID NO: 5472 |
| rs2395175 | AAGATCAGGAACCCACAGGAAGCT | SEQ ID NO: 741 | AAGATCAGGAACCCACAGGAAGCC | SEQ ID NO: 3107 | CTGCTGATGTTGCAGATCCT | SEQ ID NO: 5473 |
| rs2844793 | CATTCTGCAGAAACCTGTCACCATT | SEQ ID NO: 742 | CATTCTGCAGAAACCTGTCACCATC | SEQ ID NO: 3108 | ACTGTGGGCACAATTTCTG | SEQ ID NO: 5474 |
| rs2395327 | GATCACATGCTTCAGAGGGCAA | SEQ ID NO: 743 | GATCACATGCTTCAGAGGGCAG | SEQ ID NO: 3109 | AAAAGATCACAAGGCAGAGG | SEQ ID NO: 5475 |
| rs1265074 | CCCCATCCACCTCAAAGTGCA | SEQ ID NO: 744 | CCCCATCCACCTCAAAGTGCC | SEQ ID NO: 3110 | AAACTTCACCTCTCCTGGC | SEQ ID NO: 5476 |
| rs3117228 | GGGCCTGACTCTTAGAAAACACTCTATA | SEQ ID NO: 745 | GGGCCTGACTCTTAGAAAACACTCTATC | SEQ ID NO: 3111 | ATATTGAAAATTTGAAGTCTAGTGA | SEQ ID NO: 5477 |
| rs429479 | TGATCAAGGGACTAGAACACTAAACTGGA | SEQ ID NO: 746 | TGATCAAGGGACTAGAACACTAAACTGGG | SEQ ID NO: 3112 | AAATGAGAATATATTAACTAGGGGA | SEQ ID NO: 5478 |
| rs1634720 | GGCACATCTTGATCTGGAAAGT | SEQ ID NO: 747 | GGCACATCTTGATCTGGAAAGC | SEQ ID NO: 3113 | GGTAGGTGAGTGTATGCATGT | SEQ ID NO: 5479 |
| rs3095302 | CTTGGCTCCAGCGAGAGGCCA | SEQ ID NO: 748 | CTTGGCTCCAGCGAGAGGCCG | SEQ ID NO: 3114 | TTCCTCTCCTCTCTCTTTCTC | SEQ ID NO: 5480 |
| rs423023 | GTGTGTGTGAGTGGCTGGGGG | SEQ ID NO: 749 | GTGTGTGTGAGTGGCTGGGGC | SEQ ID NO: 3115 | GCACAAGCTGTGAGGAGAAC | SEQ ID NO: 5481 |
| rs6456880 | CTGATGGATGGTAAGGCAGTGCTT | SEQ ID NO: 750 | CTGATGGATGGTAAGGCAGTGCTG | SEQ ID NO: 3116 | TCTTGGAAGGTTTTCCCAC | SEQ ID NO: 5482 |
| rs1065461 | GTCCGATGGTGCCTTGGCA | SEQ ID NO: 751 | GTCCGATGGTGCCTTGGCG | SEQ ID NO: 3117 | TGGACCTTAGGTCTGAATGC | SEQ ID NO: 5483 |
| rs6923313 | GCCACTAGGAGAATTAAAACCATAAGCTA | SEQ ID NO: 752 | GCCACTAGGAGAATTAAAACCATAAGCTG | SEQ ID NO: 3118 | AAAATGTTTACTTGACACATAAGAA | SEQ ID NO: 5484 |
| rs1367730 | TCAAAATGCTGCATAGAATGTCAGAT | SEQ ID NO: 753 | TCAAAATGCTGCATAGAATGTCAGAC | SEQ ID NO: 3119 | GTTAAACAATTTTGTTAGAGTAAAATG | SEQ ID NO: 5485 |
| rs1800629 | GCAATAGGTTTTGAGGGGCATGA | SEQ ID NO: 754 | GCAATAGGTTTTGAGGGGCATGG | SEQ ID NO: 3120 | GTCCTACACACAAATCAGTCAGT | SEQ ID NO: 5486 |
| rs2240070 | TTCCCCTCCTTTTGCTCAAGAAT | SEQ ID NO: 755 | TTCCCCTCCTTTTGCTCAAGAAC | SEQ ID NO: 3121 | CGTCCATTCCTTCTCCAACT | SEQ ID NO: 5487 |
| rs520803 | CAAGTGCCCCCATTCTGACAT | SEQ ID NO: 756 | CAAGTGCCCCCATTCTGACAC | SEQ ID NO: 3122 | GGTGGCTGACACAGTTGTCT | SEQ ID NO: 5488 |
| rs3734838 | AGTGCAGGGGGGTAAAAATTAATAACT | SEQ ID NO: 757 | AGTGCAGGGGGGTAAAAATAAATAACC | SEQ ID NO: 3123 | AATAAATAATCATGGGCTGTTTAC | SEQ ID NO: 5409 |
| rs3132468 | GCCCCAGCCCTGGCTTGA | SEQ ID NO: 758 | GCCCCAGCCCTGGCTTGG | SEQ ID NO: 3124 | AAGCACTTATGGGTGTAGATG | SEQ ID NO: 5490 |
| rs3094159 | GTTTTGCCAGGTGAGTGTGACAAT | SEQ ID NO: 759 | GTTTTGCCAGGTGAGTGTGACAAC | SEQ ID NO: 3125 | GGGATGGAAATTATTTACCATAG | SEQ ID NO: 5491 |
| rs3160665 | CTTGTGTGCTTGCTGGGATCAAA | SEQ ID NO: 760 | CTTGTGTGCTTGCTGGGATCATG | SEQ ID NO: 3126 | CAACCTGCTTACTTTTTCTCTTT | SEQ ID NO: 5492 |
| rs2518027 | GACCTGAGAAGATGCCCTGGTTA | SEQ ID NO: 761 | GACCTGAGAAGATGCCCTGGTTC | SEQ ID NO: 3127 | TGTGATAGAAGCCTCTACACAAT | SEQ ID NO: 5493 |
| rs1362068 | AATGTGCATCATGAGAAAAGAAATGT | SEQ ID NO: 762 | AATGTGCATCATGAGAAAAGAAATGC | SEQ ID NO: 3128 | GTAGGAATTTCTGTACAGGAAG | SEQ ID NO: 5494 |
| rs1264542 | AACCAGGTGTTGATCTGGGCTTT | SEQ ID NO: 763 | AACCAGGTGTTGATCTGGGCTTC | SEQ ID NO: 3129 | TAGGCTCATGTGCTCTGGAG | SEQ ID NO: 5495 |
| rs2223638 | TGCGCTGCACTTAACATTTGCTA | SEQ ID NO: 764 | TGCGCTGCACTTAACATTTGCTG | SEQ ID NO: 3130 | TTAAAACAAAAAAATTTTGGAA | SEQ ID NO: 5496 |
| rs2281390 | CATGGTCTCAGGCACCTGGATTAT | SEQ ID NO: 765 | CATGGTCTCAGGCACCTGGATTAG | SEQ ID NO: 3131 | ACCAAGGGAAGACAGAGTTATAA | SEQ ID NO: 5497 |
| rs1265094 | TATAGGGGAGGAGTGGAGGAGGGA | SEQ ID NO: 766 | TATAGGGGAGGAGTGGAGGAGGGG | SEQ ID NO: 3132 | AGGAATACCATCAGAACAGAACT | SEQ ID NO: 5498 |
| rs2523994 | CAGAGAAGTCTTAGGCCCGGCA | SEQ ID NO: 767 | CAGAGAAGTCTTAGGCCCGGCC | SEQ ID NO: 3133 | TAATCCCTAAATTTCACAATGTG | SEQ ID NO: 5499 |
| rs2857129 | CCAGCAGGCCTTCACCAGAA | SEQ ID NO: 766 | CCAGCAGGCCTTCACCAGAT | SEQ ID NO: 3134 | CCTACCAGGCTGACACACT | SEQ ID NO: 5500 |
| rs885403 | AGTGATGTCTGAGGTGGCCACAA | SEQ ID NO: 769 | AGTGATGTCTGAGGTGGCCACAG | SEQ ID NO: 3135 | TCTCCAAAAAATATCCTTTCTAGA | SEQ ID NO: 5501 |
| rs2213565 | CTACCGCTGCCACCAATGGTAT | SEQ ID NO: 770 | CTACOGCTGCCACCAATGGTAC | SEQ ID NO: 3136 | CGCCTCTCTTTACTGAAACTAAT | SEQ ID NO: 5502 |
| rs1419658 | CTGGTGCTGGGGGTGACAGT | SEQ ID NO: 771 | CTGGTGCTGGGGGTGACAGC | SEQ ID NO: 3137 | TGGGGAAAGATGCTAGATG | SEQ ID NO: 5503 |
| rs2022109 | GCAAGAGGATCACCTAGGAGAGTAAATTAC | SEQ ID NO: 772 | GCAAGAGGATCACCTAGGAGAGTAAATTAG | SEQ ID NO: 3136 | AAAAGATGGCAGTATTAGCAATC | SEQ ID NO: 5504 |
| rs3128928 | CAGACACCAGGAGGAAAGGGGTT | SEQ ID NO: 773 | CAGACACCAGGAGGAAAGGGGTG | SEQ ID NO: 3139 | CCTCTCACTCTGTGTGTATTTCT | SEQ ID NO: 5505 |
| rs707913 | GCCACTGCTGGATACCCCAA | SEQ ID NO: 774 | GCCACTGCTGGATACCCCAG | SEQ ID NO: 3140 | GGTTTGGGAAGAGGAAGAG | SEQ ID NO: 5506 |
| rs2027856 | GGCTCTTCAGATTCCTTCATGGCT | SEQ ID NO: 775 | GGCTCTTCAGATTCCTTCATGGCC | SEQ ID NO: 3141 | ACTAAAACATTCTTTGTGTCCAC | SEQ ID NO: 5507 |
| rs2747454 | TGATGTCAGGTTCCAGGGTCAGT | SEQ ID NO: 776 | TGATGTCAGGTTCCAGGGTCAGC | SEQ ID NO: 3142 | ACCTCTGCCCAACTCAGAC | SEQ ID NO: 5508 |
| rs3132552 | GATACGCGTGGGGTCCTTACAA | SEQ ID NO: 777 | GATACGCGTGGGGTCCTTACAG | SEQ ID NO: 3143 | GGTCTGAGAAGGTGCCAAT | SEQ ID NO: 5509 |
| rs3130989 | GGTAAGTTGGGCCTGGGGTTTTC | SEQ ID NO: 778 | GGTAAGTTGGGCCTGGGGTTTTG | SEQ ID NO: 3144 | AAGGAAAGATAAGGAAAGATGTG | SEQ ID NO: 5510 |
| rs3017964 | CCTTCAACCCCATTAGGCCATAAA | SEQ ID NO: 779 | CCTTCAACCCCATTAGGCCATAAT | SEQ ID NO: 3145 | ATTAAGGGAAGGGTCCCTG | SEQ ID NO: 5511 |
| rs154971 | GAATGGAACGGTGGCTCTGAAA | SEQ ID NO: 760 | GAATGGAACGGTGGCTCTGAAG | SEQ ID NO: 3146 | TGAGGGTCTTCAGAATAAAGTAA | SEQ ID NO: 5512 |
| rs4713326 | CTCCTGGCCTCATGACCCAGG | SEQ ID NO: 781 | CTCCTGGCCTCATGACCCAGC | SEQ ID NO: 3147 | GTCCAATCCTGACATCCCT | SEQ ID NO: 5513 |
| rs3132499 | GCATTTTACCCCTTAGTACTGGGGCA | SEQ ID NO: 782 | GCATTTACCCCTTAGTACTGGGGCG | SEQ ID NO: 3148 | TCTCAGTAAGGATGAAATGTGT | SEQ ID NO: 5514 |
| rs2395318 | CATTTTGTGTAGTGCTGGATTGGTAGT | SEQ ID NO: 783 | CATTTTGTGTAGTGCTGGATTGGTAGC | SEQ ID NO: 3149 | GTGAAGTCTCTCAGCATTTGTT | SEQ ID NO: 5515 |
| rs3823343 | GTGTTGGGCGGAACAGTGGACA | SEQ ID NO: 784 | GTGTTGGGCGGAACAGTGGACG | SEQ ID NO: 3150 | AGCTGTGCTATGGGGTTTCT | SEQ ID NO: 5516 |
| rs2071463 | CCAGCAACTGTCGACGTCACAT | SEQ ID NO: 785 | CCAGCAACTGTCGACGTCACAC | SEQ ID NO: 3151 | AATGGGAGATATTTTACTAGGCAA | SEQ ID NO: 5517 |
| rs2857770 | GCAAGGAGGGTATGGGGAATGTTT | SEQ ID NO: 786 | GCAAGGAGGGTATGGGGAATGTTC | SEQ ID NO: 3152 | ATCAACAACAAAGTCCTTTCTCT | SEQ ID NO: 5518 |
| rs4248154 | GAAATGGGACATGGAGGAACACAT | SEQ ID NO: 787 | GAAATGGGACATGGAGGAACACAC | SEQ ID NO: 3153 | GCTTTGGATATGGAGTGGG | SEQ ID NO: 5519 |
| rs3132595 | GAGAATGTAAGAGGGGCAAGGGTC | SEQ ID NO: 788 | GAGAATGTAAGAGGGGCAAGGGTG | SEQ ID NO: 3154 | GTACCTTAACACAAGGGAAGAGA | SEQ ID NO: 5520 |
| rs3749970 | CTGCGACTGCACACGAGGTTTACA | SEQ ID NO: 789 | CTGCGACTGCACACGAGGAACG | SEQ ID NO: 3155 | GCAGTGTCACTGAAGAATAAGAA | SEQ ID NO: 5521 |
| rs541862 | CTCAACTTGCTCACCCTGCCAT | SEQ ID NO: 790 | CTCAACTTGCTCACCCTGCCAC | SEQ ID NO: 3156 | TGTATCCCTGCCTTTAGCC | SEQ ID NO: 5522 |
| rs2075582 | GGCACTGGGGGAAACTTAGGCA | SEQ ID NO: 791 | GGCACTGGGGGAAACTTAGGCG | SEQ ID NO: 3157 | CTCCTCCAAGGCTCTCTTG | SEQ ID NO: 5523 |
| rs2854048 | CAGCCTCGGACTCCATCTCTCA | SEQ ID NO: 792 | CAGCCTCGGACTCCATCTCTCG | SEQ ID NO: 3158 | AAGCAAGACAACAGGGGTC | SEQ ID NO: 5524 |
| rs1557607 | CTTGGTCCCTTCTGACGTCACCA | SEQ ID NO: 793 | CTTGGTCCCTTCTGACGTCACCG | SEQ ID NO: 3159 | GGAGTCTGAACAGCAGATAATT | SEQ ID NO: 5525 |
| rs1362070 | GCTTTGCGGGTTCTGTGTCTTAT | SEQ ID NO: 794 | GCTTTGCGGGTTCTGTGTCTTAC | SEQ ID NO: 3160 | GGAACCCAGGTAACTACTAGATT | SEQ ID NO: 5526 |
| rs2621337 | CCTACCAGGCTGACACACTGATCTT | SEQ ID NO: 795 | CCTACCAGGCTGACACACTGATCTC | SEQ ID NO: 3161 | TGAAAAATACATTTCTGCTGTTT | SEQ ID NO: 5527 |
| rs3807030 | CAAGGGGAACAAATGCATACTCAGT | SEQ ID NO: 796 | CAAGGGGAACAAATGCATACTCAGG | SEQ ID NO: 3162 | TAGTGATCAAGGGGTTACTGTAA | SEQ ID NO: 5528 |
| rs2596502 | GTGTGAGGGGTCCTTGTGCTGT | SEQ ID NO: 797 | GTGTGAGGGGTCCTTGTGCTGC | SEQ ID NO: 3163 | GCCTGAGGCTATGTTAATAAAGA | SEQ ID NO: 5529 |
| rs2076530 | GCCAGTTTGGATCTGAAGGTGGTAA | SEQ ID NO: 798 | GCCAGTTTGGATCTGAAGGTGGTAG | SEQ ID NO: 3164 | ATTTTGTATTCAATACCTGCTCC | SEQ ID NO: 5530 |
| rs885932 | GCAAACCTCCTGAGTGGGATTCT | SEQ ID NO: 799 | GCAAACCTCCTGAGTGGGATTCC | SEQ ID NO: 3165 | GTGAGGATTGTGTAGCATCTTC | SEQ ID NO: 5531 |
| rs2517598 | GAGGCACCAGGAGATGTTCCAT | SEQ ID NO: 800 | GAGGCACCAGGAGATGTTCCAC | SEQ ID NO: 3166 | GAAGTTCCTCTGTTTTGTGTGT | SEQ ID NO: 5532 |
| rs2524079 | CCCCTCCCAGTCACTCCTGAA | SEQ ID NO: 801 | CCCCTCCCAGTCACTCCTGAG | SEQ ID NO: 3167 | AGAGAACAGTTTCTTTTCCCTAA | SEQ ID NO: 5533 |
| rs4286818 | GTGCTCCTGCTCCTGTGGGTA | SEQ ID NO: 802 | GTGCTCCTGCTCCTGTGGGTG | SEQ ID NO: 3168 | GAGAGAGTGAGTTGTTTCTGTTG | SEQ ID NO: 5534 |
| rs4151650 | GGCAGAGCCCCGGAGAGTA | SEQ ID NO: 803 | GGCAGAGCCCCGGAGAGTG | SEQ ID NO: 3169 | AACCGTCATAGCAGTGGAAA | SEQ ID NO: 5535 |
| rs2523933 | TTTCTGCTTAGCTGGCAGGACTCA | SEQ ID NO: 804 | TTTCTGCTTAGCTGGCAGGACTCC | SEQ ID NO: 3170 | CTGTCTCTCCCAAATGATTATG | SEQ ID NO: 5536 |
| rs194675 | AAAAGATGGCAGTATTAGCAATCTCT | SEQ ID NO: 805 | AAAAGATGGCAGTATTAGCAATCTCA | SEQ ID NO: 3171 | TAGTTTGACTACATTCATTCCAAA | SEQ ID NO: 5537 |
| rs3130615 | CCCAGCTTCCATCCCCTGTT | SEQ ID NO: 806 | CCCAGCTTCCATCCCCTGTC | SEQ ID NO: 3172 | CAGCAGCCTTGTCACCTAC | SEQ ID NO: 5538 |
| rs2050188 | CAGAGATTTTTAAGGCCAGAGATTGTAT | SEQ ID NO: 807 | CAGAGATTTTTAAGGCCAGAGATTGTAC | SEQ ID NO: 3173 | TCATTAATCTTTGTAACTCTTTTTTT | SEQ ID NO: 5539 |
| rs2395173 | GCTCTGCCCCAGGTTTCTGAACA | SEQ ID NO: 808 | GCTCTGCCCCAGGTTTCTGAACG | SEQ ID NO: 3174 | ACTCAGTATTATGAGATTTGGGAG | SEQ ID NO: 5540 |
| rs1573299 | CCGAGCTCATCAGCAGTGACAT | SEQ ID NO: 809 | CCGAGCTCATCAGCAGTGACAC | SEQ ID NO: 3175 | CTGAGTTCCTGCAGTACTTGTT | SEQ ID NO: 5541 |
| rs417812 | GGAGTCCCCATGAGCCTGTCT | SEQ ID NO: 810 | GGAGTCCCCATGAGCOTGTCC | SEQ ID NO: 3176 | CTTCAGAACTGTTGTTAGCTGAG | SEQ ID NO: 5542 |
| rs1633029 | CCGCCACAGTGCTAGGATTGT | SEQ ID NO: 811 | CCGCCAGAGTGCTAGGATTGG | SEQ ID NO: 3177 | CACCTGGCATGAATTAATTATAA | SEQ ID NO: 5543 |
| rs7454158 | AAAAAAAGCAAAAGCCAGTGACT | SEQ ID NO: 812 | AAAAAAGCAAAAGCCAGTGAGC | SEQ ID NO: 3178 | TGATGAAGCAATAAAATCATTAGT | SEQ ID NO: 5544 |
| rs2516670 | TTCTGTCTTCTCAAGCTTGATCTTTACTT | SEQ ID NO: 813 | TTCTGTCTTCTCAAGCTTGATCTTTACTC | SEQ ID NO: 3179 | AGTCTTCTTCATTGTCACAGTATC | SEQ ID NO: 5545 |
| rs4151652 | TGATCATTCCAGCCCCTCTGAAT | SEQ ID NO: 814 | TGATCATTCCAGCCCCTCTGAAC | SEQ ID NO: 3180 | GAAAATCTCCAGGTCCTATTCT | SEQ ID NO: 5546 |
| rs5026741 | TGGAGACTACAGGCAGGAAACCAT | SEQ ID NO: 815 | TGGAGACTACAGGCAGGAAACCAC | SEQ ID NO: 3181 | TGCTAGAGATGAGACTTTGCTAT | SEQ ID NO: 5547 |
| rs2158288 | TTTGCTTTTTGATTCAAAAATTTCACT | SEQ ID NO: 816 | TTTGCTTTTTGATTCAAAAATTTCACA | SEQ ID NO: 3182 | TAGTAAACAGAGCTATTTGTTCCTG | SEQ ID NO: 5548 |
| rs1051790 | GGGAGCTCTTCCTCTCCCAAAACG | SEQ ID NO: 817 | GGGAGCTCTTCCTCTCCCAAAACC | SEQ ID NO: 3183 | GGAGACTGAGGAATGGACA | SEQ ID NO: 5549 |
| rs3828799 | GGTCTCTCTGCCTACTCTTCCTTGCG | SEQ ID NO: 818 | GGTCTCTCTGCCTACTCTTCCTTGCC | SEQ ID NO: 3184 | CAACTCCATTCCAGGTGTG | SEQ ID NO: 5550 |
| rs1737005 | GTGGTCCATGACCATGGCAT | SEQ ID NO: 819 | GTGGTCCATGACCATGGCAC | SEQ ID NO: 3185 | CCCTGGTCTTATCACCACCT | SEQ ID NO: 5551 |
| rs3132946 | GTGCACCATCCTGATGCCTGTT | SEQ ID NO: 820 | GTGCACCATCCTGATGCCTGTC | SEQ ID NO: 3186 | TAGCCCCTTTAATCTCCCC | SEQ ID NO: 5552 |
| rs3132467 | AGGCACTTTCCAGGTTCCCACT | SEQ ID NO: 821 | AGGCACTTTCCAGGTTCCCACC | SEQ ID NO: 3187 | TGCAGATGACACAGATGAATAG | SEQ ID NO: 5553 |
| rs2076542 | CCTGACTTGGGGATGCCTCAA | SEQ ID NO: 822 | CCTGACTTGGGGATGCCTCAG | SEQ ID NO: 3188 | GCCATGTAAAGCTTTAAAATTCT | SEQ ID NO: 5554 |
| rs3828882 | ACTTGCAGGTCAGGGGTCCCA | SEQ ID NO: 823 | ACTTGCAGGTCAGGGGTCCCG | SEQ ID NO: 3189 | GTGAGAACAGTGAAGAGAAACAG | SEQ ID NO: 5555 |
| rs3094717 | CAGTGCAGGTTTGTGGTCGCTC | SEQ ID NO: 824 | CAGTGCAGGTTTGTGGTCGTTG | SEQ ID NO: 3190 | ACCTGCACTGTCTCCTATAGAG | SEQ ID NO: 5556 |
| rs3094214 | GAGAAACCCGAGAGGCCGATT | SEQ ID NO: 825 | GAGAAACCCGAGAGGCCGATG | SEQ ID NO: 3191 | CTGAGATAAGGCAGAAAGGTG | SEQ ID NO: 5557 |
| rs2734984 | GTTTCCATGCTGGGCCTGCCA | SEQ ID NO: 826 | GTTTCCATGCTGGGCCTGCCG | SEQ ID NO: 3192 | GCTGATGGGATTCTTTAATGG | SEQ ID NO: 5558 |
| rs3131018 | AAAGCCAGCCAGAACCAAGCAT | SEQ ID NO: 827 | AAAGCCAGCCAGAACCAAGCAG | SEQ ID NO: 3193 | GCTGCAGAAGGAGAGAAGG | SEQ ID NO: 5559 |
| rs419957 | CTTTGTGGCCATCAGCTTCCTC | SEQ ID NO: 828 | CTTTGTGGCCATCAGCTTCCTG | SEQ ID NO: 3194 | CCTTAGTTGTCCTTGTGTACCT | SEQ ID NO: 5560 |
| rs1737075 | AGGAGTTGAGGCCGGGGAGA | SEQ ID NO: 829 | AGGAGTTGAGGCCGGGGAGC | SEQ ID NO: 3195 | GCTTCAAGCTGTAGGGGAT | SEQ ID NO: 5561 |
| rs3765607 | GGGAGCACAGAGCCCAGACACT | SEQ ID NO: 830 | GGGAGCACAGAGCCCAGACACC | SEQ ID NO: 3196 | GATAATCTCCTATTCCTTGGAAA | SEQ ID NO: 5562 |
| rs1800683 | AGGAGAGCCTCACCTGCTGTGT | SEQ ID NO: 831 | AGGAGAGCCTCACCTGCTGTGC | SEQ ID NO: 3197 | CTCAGGTCCCTTTATAGAGGAA | SEQ ID NO: 5563 |
| rs3763315 | CATAAATATCATACTGCCCTTTTCGATA | SEQ ID NO: 832 | CATAAATATGATACTGCCCTTTTCGATC | SEQ ID NO: 3198 | AGGTATTGTGAATGGGCTCATA | SEQ ID NO: 5564 |
| rs2187824 | GGAAGCCCTGGTGTGGGAAATTAT | SEQ ID NO: 833 | GGAAGCCCTGGTGTGGGAAATTAC | SEQ ID NO: 3199 | GACAGAAAGAAGGCTAGAGAGAC | SEQ ID NO: 5565 |
| rs6457041 | GGACCACGCTTCATCCCCTTT | SEQ ID NO: 834 | GGACGACGCTTCATCCCCTTC | SEQ ID NO: 3200 | GCAGATAATGTACTGAAATTCTGA | SEQ ID NO: 5566 |
| rs2285797 | CACAGCTAAAGCCAATAAAAATAAACAA | SEQ ID NO: 835 | CACAGCTAAAGCCAATAAAAATAAACAG | SEQ ID NO: 3201 | AATAGGATCTACTTTTCTGGAATC | SEQ ID NO: 5567 |
| rs2621336 | TGGAGAAGACAGCTATTTTCCATAAAAGTA | SEQ ID NO: 836 | TGGAGAAGACAGCTATTTTCCATATAAGTG | SEQ ID NO: 3202 | GTTGAAATGTTAACATGTAATGGG | SEQ ID NO: 5568 |
| rs4713614 | CAGCTCCAAGGGTGTGACAGGA | SEQ ID NO: 837 | CAGCTCCAAGGGTGTGACAGGC | SEQ ID NO: 3203 | CTCCCTCTATACATGATCTCCC | SEQ ID NO: 5569 |
| rs4428528 | TTAAGAATATGACTTGGCGACTGGG | SEQ ID NO: 838 | TTAAGAATATGACTTGGCGACTGGC | SEQ ID NO: 3204 | AGGCAAATAAATCAGTAAACCTT | SEQ ID NO: 5570 |
| rs2071365 | CCAGTAAGAATGACTCAGAGTCTCCCT | SEQ ID NO: 839 | CCAGTAAGAATGACTCAGAGTCTCCCC | SEQ ID NO: 3205 | CTCTGAAATACTGAAGTATTTATTGG | SEQ ID NO: 5571 |
| rs2246638 | AGAGAGCCAAGGGCCCCACA | SEQ ID NO: 840 | AGAGAGCCAAGGGCCCCACG | SEQ ID NO: 3206 | TGGAAAGCATCAGAGAGGA | SEQ ID NO: 5572 |
| rs1264697 | TGCTTCTCACAACTGCTTAAATTAGGTATC | SEQ ID NO: 841 | TGTTTCTCACAACTGGTTAAATTAGGTATG | SEQ ID NO: 3207 | TTACATTCCCATATTCCAAATAT | SEQ ID NO: 5573 |
| rs2280773 | AACTGGGACTGCAGCTGGGAT | SEQ ID NO: 842 | AACTGGGACTGCAGCTGGGAC | SEQ ID NO: 3208 | GTCACAGAAGTCACTGAGATCAG | SEQ ID NO: 5574 |
| rs4248169 | AAAACTGCCTTATAACACCATTCAAGA | SEQ ID NO: 843 | AAAACTGCCTTATAACACCATTCAAGC | SEQ ID NO: 3209 | TTGTTTTTATTTTCAGCAAACAC | SEQ ID NO: 5575 |
| rs1632941 | ACCAGAGGGAGGGCGATATTCTA | SEQ ID NO: 844 | ACCAGAGGGAGGGCGATATTCTG | SEQ ID NO: 3210 | TGTTGGTCCCATTTTCCTC | SEQ ID NO: 5576 |
| rs1610653 | GTACACATGCCATGTGCAGCAT | SEQ ID NO: 845 | GTACACATGCCATGTGCAGCAC | SEQ ID NO: 3211 | CACTAAGATGGGGTAAGGAGAC | SEQ ID NO: 5577 |
| rs6911894 | CCAAATATACTGAAATAATGATGTGCTGT | SEQ ID NO: 846 | CCAAATATACTGAAATAATGATGTGCTGC | SEQ ID NO: 3212 | GTCTTTTCATCTGTTAATATGGTG | SEQ ID NO: 5578 |
| rs3778614 | CTCAGGCCCTCCTCTCCCCTT | SEQ ID NO: 847 | CTCAGGCCCTCCTCTCCCCTC | SEQ ID NO: 3213 | CACTCCTTATTTGTGACACTAGC | SEQ ID NO: 5579 |
| rs2523619 | CAACTGCAGGGGTGACTGGA | SEQ ID NO: 848 | CAACTGCAGGGGTGACTGGG | SEQ ID NO: 3214 | TGTTGTTGTCCTCTTCCAG | SEQ ID NO: 5580 |
| rs3213483 | GGAAGGATCAGCGGGAGCTCTT | SEQ ID NO: 849 | GGAAGGATCAGCGGGAGCTCTG | SEQ ID NO: 3215 | CACAGTAAAAGGAAACCAGTT | SEQ ID NO: 5581 |
| rs2857713 | GGAGGTGTAGGGTGGTGCCACA | SEQ ID NO: 850 | GGAGGTGTAGGGTGGTGCCACG | SEQ ID NO: 3216 | ACCCTTGGGAGGAAGAGAC | SEQ ID NO: 5582 |
| rs2072632 | AGGAATGGCCTGTGGGGGAA | SEQ ID NO: 851 | AGGAATGGCCTGTGGGGGAG | SEQ ID NO: 3217 | GGATGGGAAAGGAAGAATC | SEQ ID NO: 5583 |
| rs2074469 | GAGAGGGTGCGCAGGAAGAA | SEQ ID NO: 852 | GAGAGGGTGCGCAGGAAGAG | SEQ ID NO: 3218 | TACATAGGGGACTGGAGGG | SEQ ID NO: 5584 |
| rs2071876 | ACGCCTTAGCGCTTCCAGCTCT | SEQ ID NO: 853 | ACGCCTTAGCGCTTCCAGGTCC | SEQ ID NO: 3219 | GCTCAGATTCCAGCTCCTC | SEQ ID NO: 5585 |
| rs3819686 | AGAATTTACGCCTGGACTCCTCAT | SEQ ID NO: 854 | AGAATTTACGCCTGGACTCCTCAG | SEQ ID NO: 3220 | AATTCTCTGTCTCTTCAGGGTC | SEQ ID NO: 5586 |
| rs1049414 | CAGCTCTCCTAGAGGGGGGCA | SEQ ID NO: 855 | CAGCTCTCCTAGAGGGGGGCG | SEQ ID NO: 3221 | GTGAGATGAAGAAGTGTCACAG | SEQ ID NO: 5587 |
| rs1048412 | TGACCTTTTTCCTGGGCAACTCTA | SEQ ID NO: 856 | TGACCTTTTTCCTGGGCAACTCTG | SEQ ID NO: 3222 | GGTGAAGGATACTGGGTTTTTA | SEQ ID NO: 5588 |
| rs2269420 | GGACACAGGGGCCTTGAAAGT | SEQ ID NO: 857 | GGACACAGGGGCCTTGAAAGG | SEQ ID NO: 3223 | AGGAACAGAGACACACAGAGAG | SEQ ID NO: 5589 |
| rs7750641 | CTGACCTTTGGCCCTGAAGGGT | SEQ ID NO: 858 | CTGACCTTTGGCCCTGAAGGGC | SEQ ID NO: 3224 | GTTCTACTTCATGTTCCAACAAG | SEQ ID NO: 5590 |
| rs2647027 | CCCTAGTCACTGCCAAGAGGAGCT | SEQ ID NO: 859 | CCCTAGTCACTGCCAAGAGGAGCC | SEQ ID NO: 3225 | AAAACACATTGATGTAGATATGTCC | SEQ ID NO: 5591 |
| rs3815095 | CCCTCCCCGCACAGGAAAA | SEQ ID NO: 860 | GCCTCGCCGCACAGGAAAT | SEQ ID NO: 3226 | CAACTCAGAGGACATCCCCTA | SEQ ID NO: 5592 |
| rs3130999 | GGCACTCAGCTGATGCCCTTT | SEQ ID NO: 861 | GGCACTCAGCTGATGCCCTTC | SEQ ID NO: 3227 | ATTAGCTTTAGGTCTCCACCAC | SEQ ID NO: 5593 |
| rs3134940 | CGCGCCCAGCCGTCTGTT | SEQ ID NO: 862 | CGCGCCCAGCCGTCTGTC | SEQ ID NO: 3228 | CTTTTTTTAGCTCAGAGGGAAG | SEQ ID NO: 5594 |
| rs743400 | CACCCCGGGCTATTTGACAGT | SEQ ID NO: 863 | CACCCCGGGCTATTTGACAGC | SEQ ID NO: 3229 | GAAATGTTAGCTTCTGAGGGAT | SEQ ID NO: 5595 |
| rs4711187 | TCTATTAGCTCCAGAAATACTTCCACAA | SEQ ID NO: 864 | TCTATTAGCTCCAGAAATACTTCCACAG | SEQ ID NO: 3230 | TATGATTTCATTGTTTTCACTTAGT | SEQ ID NO: 5596 |
| rs2395038 | CCTGGGTGACAGGAGGAGAA | SEQ ID NO: 865 | CCTGGGTGACAGGAGGAGAC | SEQ ID NO: 3231 | CTGTCCCCAAAACAAAAATAA | SEQ ID NO: 5597 |
| rs2239689 | AGGCCCACCAGGCATGCCT | SEQ ID NO: 866 | AGGCCCACCAGGCATGCCC | SEQ ID NO: 3232 | CCCATTCTATTTTCTGATGCA | SEQ ID NO: 5598 |
| rs995185 | GACAGTCCTGGCCCTGGCTA | SEQ ID NO: 867 | GACAGTCCTGGCCCTGGCTT | SEQ ID NO: 3233 | CATAGGAAGGGAAGAGTAAAGAG | SEQ ID NO: 5599 |
| rs3830041 | CAGCCATAGGGAAGAGGGGAAA | SEQ ID NO: 868 | CAGCCATAGGGAAGAGGGGAAG | SEQ ID NO: 3234 | GGGAACACACTGACCACCT | SEQ ID NO: 5600 |
| rs2523945 | CCCTCTCTGCCTTGGGACCTTA | SEQ ID NO: 869 | CCCTCTCTGCCTTGGGACCTTG | SEQ ID NO: 3235 | GCTGTTCCCACCTCTTGAC | SEQ ID NO: 5601 |
| rs3130099 | CCCAGCAAACACACGGGTTA | SEQ ID NO: 870 | CCCAGCAAACACACGGGTTG | SEQ ID NO: 3236 | AGCCAAGTAAATGACCAATAAAT | SEQ ID NO: 5602 |
| rs3130374 | AATATTGCCCAGTCGCACAGCTA | SEQ ID NO: 871 | AATATTGCCCAGTCGCACAGCTG | SEQ ID NO: 3237 | ACTCAGCCTGTCCCAGTTATAG | SEQ ID NO: 5603 |
| rs2524272 | GCCCAGAAACGTCAGGAAGGAAA | SEQ ID NO: 872 | GCCCAGAAACCTCAGGAAGGAAG | SEQ ID NO: 3238 | TTTGAACCATGCTCCCAGATA | SEQ ID NO: 5604 |
| rs3093558 | TTCTCCTTCAGCCTCCTCCCTTT | SEQ ID NO: 873 | TTCTCCTTCAGCCTCCTCCCTTC | SEQ ID NO: 3239 | CTTGAATTAAGCTCCTTGGAG | SEQ ID NO: 5605 |
| rs7656 | CTGGGAATTCTGGGCAGGCAT | SEQ ID NO: 874 | CTGGGAATTCTGGGCAGGCAC | SEQ ID NO: 3240 | AGCAGGCATCACAGAAGAGT | SEQ ID NO: 5606 |
| rs3093992 | CGTTTCCTGCCGCTATAACAGAATAA | SEQ ID NO: 875 | CGTTTCCTGCCGCTATAACAGAATAC | SEQ ID NO: 3241 | TGGGTAATTTATTTTGTTGTTTT | SEQ ID NO: 5607 |
| rs2428509 | CTGGOACGTTGAGGTCCCCTT | SEQ ID NO: 876 | CTGGCACGTTGAGGTCCCCTC | SEQ ID NO: 3242 | ATTACCCCATTCTACTGTGTCTT | SEQ ID NO: 5608 |
| rs2071292 | GCTCCTCCTCACCAGCCCACT | SEQ ID NO: 877 | GCTCCTCCTCACCAGCCCACC | SEQ ID NO: 3243 | CTACAGGCATGTAATGAGTTCAC | SEQ ID NO: 5609 |
| rs107822 | CACGGGAGGAAAGGGGGAATA | SEQ ID NO: 878 | CACGGGAGGAPAGGGGGAATG | SEQ ID NO: 3244 | GAAACAGGGACATACACAAGAT | SEQ ID NO: 5610 |
| rs3734860 | GAAATGGGGCTAATCATTTGCTTTAA | SEQ ID NO: 879 | GAAATGGGGCTAATCATTTGCAAAT | SEQ ID NO: 3245 | TACTAGGAGAGAAGGAAGGGATA | SEQ ID NO: 5611 |
| rs4151667 | GAGCAATCTCAGCCCCCAACA | SEQ ID NO: 880 | GAGCAATCTCAGCCCCCAACT | SEQ ID NO: 3246 | TGCCTGATGCCCTTTATCT | SEQ ID NO: 5612 |
| rs887466 | GTCCCACCCCAGCTTTCAGGTA | SEQ ID NO: 881 | GTCCCACCGCAGCTTTCAGGTG | SEQ ID NO: 3247 | CTCTAGGTCAGGAAGGATTGTT | SEQ ID NO: 5613 |
| rs2857096 | GGGCCCCTTCCACAATCCTG | SEQ ID NO: 882 | GGGCCCCTTCCACAATCCTC | SEQ ID NO: 3248 | TAAAATCCAAGAGTTCTCAGAAA | SEQ ID NO: 5614 |
| rs3130976 | CTGCAGATCAGGGGCCAGAT | SEQ ID NO: 883 | CTGCAGATCAGGGGCCAGAC | SEQ ID NO: 3249 | ATCCCTTTCTGGTCAATGTAATA | SEQ ID NO: 5615 |
| rs6910473 | CTGTTCCGAAGCATGTTCCTCCT | SEQ ID NO: 884 | CTGTTCCGAAGCATGTTCCTCCC | SEQ ID NO: 3250 | CATAATCTACCTGCCTTTTGG | SEQ ID NO: 5616 |
| rs1633012 | GGGAGAGGAGGGCCTGAGGG | SEQ ID NO: 885 | GGGAGAGGAGGGCCTGAGGC | SEQ ID NO: 3251 | TGAGAGGAATGGAGGGAAG | SEQ ID NO: 5617 |
| rs2523399 | CAAGCATGTTTGTACATAAAGATTCTCCTA | SEQ ID NO: 886 | CAAGCATGTTTGTACATAAAGATTCTCCTG | SEQ ID NO: 3252 | GGTTGGGATTTTAAAAATTCA | SEQ ID NO: 5618 |
| rs2071786 | AGGGGGCAAGGCGTCTGTTTT | SEQ ID NO: 887 | AGGGGGCAAGGCGTCTGTTTC | SEQ ID NO: 3253 | CAAAATGAGTAAGACAACAAAGG | SEQ ID NO: 5619 |
| rs3823359 | CACCTCTTGACCAGCTGCCTTC | SEQ ID NO: 888 | CACCTCTTGACCAGCTGCCTTG | SEQ ID NO: 3254 | GCCCTCAGCAAGTTCTCAC | SEQ ID NO: 5620 |
| rs400488 | GGACCAGGAGCTGGTGCTTCT | SEQ ID NO: 889 | GGACCAGGAGCTGGTGCTTCC | SEQ ID NO: 3255 | ATTGCTGTGGGGACTATGG | SEQ ID NO: 5621 |
| rs2239697 | AGCCGGCTGGATCTCTTGGAA | SEQ ID NO: 690 | AGCCGGCTGGATCTCTTGGAG | SEQ ID NO: 3256 | ATGGGGTCTGTAGACACAACTA | SEQ ID NO: 5622 |
| rs4959041 | GCCACATATGGAATTACAAATTTTTCTA | SEQ ID NO: 891 | GCCACATATGGAATTACAAATTTTTCTG | SEQ ID NO: 3257 | TTAGTCACATTAAAATGATAAAAGTG | SEQ ID NO: 5623 |
| rs1042434 | GCCTGGTGCTGGGCCTAGTC | SEQ ID NO: 892 | GCCTGGTGCTGGGCCTAGTG | SEQ ID NO: 3258 | GTCCTCATCATAAAGTCTCTGC | SEQ ID NO: 5624 |
| rs3419275 | GCTGAGTGCCGGCTCACCA | SEQ ID NO: 893 | GCTGAGTGCCGGCTCACCT | SEQ ID NO: 3259 | CCTGCTGAGTTCCACTGAC | SEQ ID NO: 5625 |
| rs381218 | AATTTCTGTGATTGGCTGAAGACAGA | SEQ ID NO: 894 | AATTTCTGTGATTGGCTGAAGACAGC | SEQ ID NO: 3260 | CTCGAATCTGTTTTCTTCTTCTT | SEQ ID NO: 5626 |
| rs29230 | CCTCACCTGGCAGACGAAAGGA | SEQ ID NO: 895 | CCTCACCTGGCAGACGAAAGGG | SEQ ID NO: 3261 | ACTGGTTCCTCCCAATGTG | SEQ ID NO: 5627 |
| rs2301226 | CCCAAGTGGCTAATCAGTCCTAATTATAA | SEQ ID NO: 896 | CCCAAGTGGCTAATCAGTCCTAATTATAG | SEQ ID NO: 3262 | CCCAATTATTAGTAATTAAAGAAATG | SEQ ID NO: 5628 |
| rs742870 | CTGTCAAGGCATCAGGGAAGGT | SEQ ID NO: 697 | CTGTCAAGGCATCAGGGAAGGC | SEQ ID NO: 3263 | GAACAGATGGCTTCAATGTAG | SEQ ID NO: 5629 |
| rs6905862 | AAGATGAAGGTCTGGACCACGACT | SEQ ID NO: 898 | AAGATGAAGGTCTGGACCACGACC | SEQ ID NO: 3264 | ATCCAATCTGATGGGAGTATG | SEQ ID NO: 5630 |
| rs3129938 | GAAACACAACTGTAAACAAGACAGATTTCT | SEQ ID NO: 699 | GAAACACAACTGTAAACAAGACAGATTTCA | SEQ ID NO: 3265 | TCCTGACTTGTGAAAATTCTATAA | SEQ ID NO: 5631 |
| rs1736939 | CTGGTGGGCACCATGCATTA | SEQ ID NO: 900 | CTGGTGGGCACCATGCATTG | SEQ ID NO: 3266 | GTTCTCTACAGTGACAGCCAGT | SEQ ID NO: 5632 |
| rs4548006 | CTGGGCTTTAAGGGACCCTCAT | SEQ ID NO: 901 | CTGGGCTTTAAGGGACCCTCAC | SEQ ID NO: 3267 | GAACCATTGTGACTGGAAATT | SEQ ID NO: 5633 |
| rs2857767 | CCTAGCATTTCCCTATGAGCTAACTATGG | SEQ ID NO: 902 | CCTAGCATTTCCCTATGAGCTAACTATGC | SEQ ID NO: 3268 | ATATAGTAACCCCATTTTACAGAGG | SEQ ID NO: 5634 |
| rs241442 | ACTGTCCCCTGCCCTCTCACA | SEQ ID NO: 903 | ACTGTCCCCTGCCCTCTCACG | SEQ ID NO: 3269 | TGCACATCTAGGGCACTAGTAG | SEQ ID NO: 5635 |
| rs3093671 | TTTGTGGTGAAGGAGGGGAGAGA | SEQ ID NO: 904 | TTTGTGGTGAAGGAGGGGAGAGG | SEQ ID NO: 3270 | GGTAATCCGGAAAGAGAAAAG | SEQ ID NO: 5636 |
| rs2857433 | GGGCATAAGTTGGATGACCTATGAA | SEQ ID NO: 905 | GGGCATAAGTTGGATGACCTATGAC | SEQ ID NO: 3271 | TTTAGTCTAAAGAATTGAGACTACCG | SEQ ID NO: 5637 |
| rs1800453 | AGCTGGCTCCCAGCCTCGT | SEQ ID NO: 906 | AGCTGGCTCCCAGCCTCGC | SEQ ID NO: 3272 | TACCTCTGCAGAGCAAAGG | SEQ ID NO: 5638 |
| rs1049628 | CTGCCCCTCCCTCAGGGAGT | SEQ ID NO: 907 | CTGCCCCTCCCTCAGGGAGC | SEQ ID NO: 3273 | AGTGACACTAAAACAAGAGGACA | SEQ ID NO: 5639 |
| rs2769 | GACCCCTGTTCCCATGCTGACT | SEQ ID NO: 908 | GACCCCTGTTCCCATGCTGACC | SEQ ID NO: 3274 | GTGTTTCCTCCCCAGTCAT | SEQ ID NO: 5640 |
| rs3763295 | CCACCTCCTCAAACTCACGGCA | SEQ ID NO: 909 | CCACCTCCTCAAACTCACGGCG | SEQ ID NO: 3275 | GAGAGCTGGAACTCTTACCAG | SEQ ID NO: 5641 |
| rs3763338 | TCCTAACCTATATTATTGCACCAGTGTA | SEQ ID NO: 910 | TCCTAACCTATATTATTGCACCAGTGTG | SEQ ID NO: 3276 | CAGTTTACAAGTATTTTTAAAGAA | SEQ ID NO: 5642 |
| rs6910733 | GTGATTGGATTGTGGCTGCCCA | SEQ ID NO: 911 | GTGATTGGATTGTGGCTGCCCG | SEQ ID NO: 3277 | AGCGAGAGAGGATTTTCCC | SEQ ID NO: 5643 |
| rs3830037 | GGTCCCCTCACCTCACCCAT | SEQ ID NO: 912 | GGTCCCCTCACCTCACCCAC | SEQ ID NO: 3278 | GTCTGACCACTGAGACACATAG | SEQ ID NO: 5644 |
| rs2858330 | AAATAAGTCAGCCACTGCACCTGGA | SEQ ID NO: 913 | AAATAAGTCAGCCACTGCACCTGGG | SEQ ID NO: 3279 | AACTATTCTGCTCAAAAAAAAAA | SEQ ID NO: 5645 |
| rs1078711 | GAGCAAAGAGTCAACAAAACCTTCTGT | SEQ ID NO: 914 | GAGCAAAGAGTCAACAAAACCTTCTGG | SEQ ID NO: 3280 | TGTTTTTTGAGATAAGGTCTCAC | SEQ ID NO: 5646 |
| rs2272874 | CGGCCTGTTGGCAGAAGAGTA | SEQ ID NO: 915 | CGGCCTGTTGGCAGAAGAGTG | SEQ ID NO: 3281 | CAGCTGACCTGATGAATATCA | SEQ ID NO: 5647 |
| rs762324 | AATCCCGTTTCCAGGCTAAATTGT | SEQ ID NO: 916 | AATCCCGTTTCCAGGCTAAATTGC | SEQ ID NO: 3282 | ATGACAGTTGACGATCTCCAT | SEQ ID NO: 5648 |
| rs2061952 | GGCGGAATAGTATTCCATCATGTATATATA | SEQ ID NO: 917 | GGCGGAATAGTATTCCATCATGTATATATG | SEQ ID NO: 3283 | CACATACTAATTACCCTGATTTGA | SEQ ID NO: 5649 |
| rs4647195 | CTATGCCTCCCCCTGCCAT | SEQ ID NO: 918 | CTATGCCTCCCCCTGCCAC | SEQ ID NO: 3284 | CCCCAGGAACTCAGTTGTT | SEQ ID NO: 5650 |
| rs2523400 | ATGCCACTGCCCTCCAGACCA | SEQ ID NO: 919 | ATGCCACTGCCCTCCAGACCG | SEQ ID NO: 3285 | GCTACAGAGTGAGAATTTGTCTC | SEQ ID NO: 5651 |
| rs1041981 | AGATGCATCTTGCCCACAGCAA | SEQ ID NO: 920 | AGATGCATCTTGCCCACAGCAC | SEQ ID NO: 3286 | ACCTCATTGGTAAACATCCAC | SEQ ID NO: 5652 |
| rs1367729 | TTTTCATTGCCTCAAAATTTGATTTTA | SEQ ID NO: 921 | TTTTCATTGCCTCAAAATTTGATTTTG | SEQ ID NO: 3287 | CTTCTCTATTTTTATATTTCATTGAA | SEQ ID NO: 5653 |
| rs2523943 | GCTCCCATCCCCAGCTCATTA | SEQ ID NO: 922 | GCTCCCATCCCCAGCTCATTC | SEQ ID NO: 3288 | GGTTCTTTCGTCTCTGTCAAC | SEQ ID NO: 5654 |
| rs1233421 | CAGAAAGGCCAAGGTTCCCACA | SEQ ID NO: 923 | CAGAAAGGCCAAGGTTCCCACC | SEQ ID NO: 3289 | AACTGTGAGCCACACTGCAC | SEQ ID NO: 5655 |
| rs4988888 | CCCTGCTGGTAAATGATTCTTCATTAT | SEQ ID NO: 924 | CCCTGCTGGTAAATGATTCTTCATTAC | SEQ ID NO: 3290 | CTCTTCGAGTGAAAGTATTTGAA | SEQ ID NO: 5656 |
| rs4713260 | CACTGTTCCCTCCTCAGGGACTA | SEQ ID NO: 925 | CACTGTTCCCTCCTCAGGGACTG | SEQ ID NO: 3291 | AATTTTCCACGGAATTCG | SEQ ID NO: 5657 |
| rs3095227 | ACAGGCCCCTTCTGCGGAGA | SEQ ID NO: 926 | ACAGGCCCCTtCTGCGGAGG | SEQ ID NO: 3292 | CAGAATGCTCATCTGATTAAGAC | SEQ ID NO: 5658 |
| rs2596538 | AGGTGGGGTGGAGGGGGAGA | SEQ ID NO: 927 | AGGTGGGGTGGAGGGGGAGG | SEQ ID NO: 3293 | CTTTGGACAGAAGACCTGG | SEQ ID NO: 5659 |
| rs1480382 | ATCAAAGCAGTCATGTGTGCAATT | SEQ ID NO: 928 | ATCAAAGCAGTCATGTGTGCAATC | SEQ ID NO: 3294 | ACAGAAAAGAATAGAAATTTACTTAAG | SEQ ID NO: 5660 |
| rs2229699 | GGGACGCAGTTCTCGGACGA | SEQ ID NO: 929 | GGGACGCAGTTCTCGGACGC | SEQ ID NO: 3295 | GACGGCCTCTATTACCTCTACT | SEQ ID NO: 5661 |
| rs2276447 | GGCTCCTGCTTTCCCTGAGAAC | SEQ ID NO: 930 | GGCTCCTGCTTTCCCTGAGAAG | SEQ ID NO: 3296 | GATATGACCCCTCATCCCC | SEQ ID NO: 5662 |
| rs2074511 | CTCAGCCTCTGACCGCCCA | SEQ ID NO: 931 | CTCAGCCTCTGACCGCCCG | SEQ ID NO: 3297 | CCACCCAACAGTCCTCTTCT | SEQ ID NO: 5663 |
| rs2285795 | GAGGAAGGAGGCAGTGAGTGGT | SEQ ID NO: 932 | GAGGAAGGAGGCAGTGAGTGGC | SEQ ID NO: 3298 | ACATCTGCCCATAATGACAAT | SEQ ID NO: 5664 |
| rs2523959 | CATCACTCTTGCCTGCTGCCAA | SEQ ID NO: 933 | CATCACTCTTGCCTGCTGCCAC | SEQ ID NO: 3299 | TCTCACCTCCCTTCTGTCC | SEQ ID NO: 5665 |
| rs5020983 | CATCACTCTTGCCTGCTGCCAA | SEQ ID NO: 934 | CATCACTCTTGCCTGCTGCCAC | SEQ ID NO: 3300 | TCTCACCTCCCTTCTGTCC | SEQ ID NO: 5666 |
| rs2071353 | CCTCCAGGCTGGATGCAGACA | SEQ ID NO: 935 | CCTCCAGGCTGGATGCAGACG | SEQ ID NO: 3301 | ACTTGCCAACTTCTCTCTCTG | SEQ ID NO: 5667 |
| rs1610646 | GCTTGCTTACGATGGCAAGGATTA | SEQ ID NO: 936 | GCTTGCTTACGATGGCAAGGATTT | SEQ ID NO: 3302 | ATCGTCCTGAACGAGGAC | SEQ ID NO: 5668 |
| rs3117035 | GCTGAAAAGGGGCGTCGTGTT | SEQ ID NO: 937 | GCTGAAAAGGGGCGTCGTGTC | SEQ ID NO: 3303 | CTCCTCCTGAGGTTGATCTAAG | SEQ ID NO: 5669 |
| rs2071470 | CATTCTGGAGAAAGGAAAAAAATGAGAT | SEQ ID NO: 938 | CATTCTGGAGAAAGGAAAAAAATGAGAC | SEQ ID NO: 3304 | GTAAAATCGTCAGCCTCTTCA | SEQ ID NO: 5670 |
| rs376892 | CCCTTTCCCATGACCCCCA | SEQ ID NO: 939 | CCCTTTCCCATGACCCCCG | SEQ ID NO: 3305 | TGGCACCTGATTACGTCACT | SEQ ID NO: 5671 |
| rs1631950 | CCCCACAGGCGGTGTATGGA | SEQ ID NO: 940 | CCCCACAGGCGGTGTATGGG | SEQ ID NO: 3306 | GATTCTCTCCTCCTTCTCCTAAC | SEQ ID NO: 5672 |
| rs206781 | TCCTCCAGAAGGTCCAAAGCCA | SEQ ID NO: 941 | TCCTCCAGAAGGTCCAAAGCCG | SEQ ID NO: 3307 | AAGGGCCTAAAGCAGCACT | SEQ ID NO: 5673 |
| rs2071592 | ATGGCGCAAGCAGAGACGCT | SEQ ID NO: 942 | ATGGCGCAAGCAGAGACGCA | SEQ ID NO: 3308 | GTGGAGGACGGAAGTGAACT | SEQ ID NO: 5674 |
| rs4713274 | ACCCTTTTTGGTCTTATTTTCACTTAG | SEQ ID NO: 943 | ACCCTTTTTGGTCTTATTTTCACTTAC | SEQ ID NO: 3309 | TATCTTTGTTTATTAACTGTTCTGG | SEQ ID NO: 5675 |
| rs4959119 | CCCACCTATAGTACTGCTGCTACTCAAT | SEQ ID NO: 944 | CCCACCTATAGTACTGCTGCTACTCAAC | SEQ ID NO: 3310 | ATTTTCTTCATGTATTAGAAGAATT | SEQ ID NO: 5676 |
| rs3129744 | CAAACCAAAACAAGTCAAATTACCATAAA | SEQ ID NO: 945 | CAAACCAAAACAAGTCAAATTACCATAAC | SEQ ID NO: 3311 | GACAAAAATCTTTACATTAAAAGAG | SEQ ID NO: 5677 |
| rs1737086 | TTTCTTGGATATAACACCAAAGATACAAA | SEQ ID NO: 946 | TTTCTTGGATATAACACCAAAGATACAAC | SEQ ID NO: 3312 | ACAAAGAAAAAATTGATAAATTGG | SEQ ID NO: 5678 |
| rs2523960 | AGCAGGCAAGAGTGATGGGAGA | SEQ ID NO: 947 | AGCAGGCAAGAGTGATGGGAGG | SEQ ID NO: 3313 | CTTTTCCAGGAGAGCTGG | SEQ ID NO: 5679 |
| rs5020984 | AGCAGGCAAGAGTGATGGGAGA | SEQ ID NO: 948 | AGCAGGCAAGAGTGATGGGAGG | SEQ ID NO: 3314 | CTTTTCCAGGAGAGCTGG | SEQ ID NO: 5680 |
| rs3093542 | AGGGAGCCCCTAGGGGAGAAC | SEQ ID NO: 949 | AGGGAGCCCCTAGGGGAGAAG | SEQ ID NO: 3315 | GAGTTGAGGGGGGCTCTAG | SEQ ID NO: 5681 |
| rs2127680 | AGGAGTGGGAGCAGGGTCATA | SEQ ID NO: 950 | AGGAGTGGGAGCAGGGTCATG | SEQ ID NO: 3316 | CATCTTAAGGACAAGGGAATG | SEQ ID NO: 5682 |
| rs2844508 | CTGCTGTGGATATCCCCAGCACG | SEQ ID NO: 951 | CTGCTGTGGATATCCCCAGCACC | SEQ ID NO: 3317 | ACCTGAGAAGATGCCCTG | SEQ ID NO: 5683 |
| rs3093554 | TGGACTCTTTGCCCCTTCCAGA | SEQ ID NO: 952 | TGGACTCTTTGCCCCTTCCAGG | SEQ ID NO: 3318 | TTTCAGAAGCTGCCAGAG | SEQ ID NO: 5684 |
| rs1268928 | AGGGGCCCCTAGAGGGCCT | SEQ ID NO: 953 | AGGGGCCCCTAGAGGGCCG | SEQ ID NO: 3319 | GGGGATGGCTAGAAAACAG | SEQ ID NO: 5685 |
| rs2294881 | TCTCTATGGAAGTCCTAAGACTGAAATCA | SEQ ID NO: 954 | TCTCTATGGAAGTCCTAAGACTGAAATCG | SEQ ID NO: 3320 | TGCTTGTAGTCTTACAAATAATGTT | SEQ ID NO: 5686 |
| rs7773149 | GGGACACAAAACCAGTTAAAGATAGAAAGA | SEQ ID NO: 955 | GGGACACAAAACCAGTTAAAGATAGAAAGG | SEQ ID NO: 3321 | CATCTATTATCTITTAGTCAATGACC | SEQ ID NO: 5687 |
| rs2524197 | GGAAGCGAAAGGGGAGCTGAGT | SEQ ID NO: 956 | GGAAGCGAAAGGGGAGCTGAGC | SEQ ID NO: 3322 | TCTGTCCTCAGTCCTTGGG | SEQ ID NO: 5688 |
| rs1419635 | CGGAATACAGCTCCTAGGTTTTTGTGT | SEQ ID NO: 957 | CGGAATACAGCTCCTAGGTTTTTGTGC | SEQ ID NO: 3323 | AATTCACCAATCTTATAATTAAATATT | SEQ ID NO: 5689 |
| rs7755774 | GTCCAGGCCCCCTTCTAGTTTCC | SEQ ID NO: 958 | GTCCAGGCCCCCTTCTAGTTTCG | SEQ ID NO: 3324 | GACATGGGGATGCTGTTT | SEQ ID NO: 5690 |
| rs3131001 | TGTGTTTGCTGTGCCAGCCTTT | SEQ ID NO: 959 | TGTGTTTGCTGTGCCAGCCTTG | SEQ ID NO: 3325 | CTCTGCTGTGTTTTGGAAGTT | SEQ ID NO: 5691 |
| rs1610676 | TTGTGTTTTCTATTCATATTGCTATTCCA | SEQ ID NO: 960 | TTGTGTTTTCTATTCATATTGCTATTCCG | SEQ ID NO: 3326 | CACTGGTTATTCCTTTCTACTCTT | SEQ ID NO: 5692 |
| rs6901686 | GGACGGAGGGAAGACCCTGA | SEQ ID NO: 961 | GGACGGAGGGAAGACCCTGG | SEQ ID NO: 3327 | AGAGTTAGGGTCAGGGAGAGTT | SEQ ID NO: 5693 |
| rs3094200 | GGACTCACCTCTGCAGCCACAA | SEQ ID NO: 962 | GGACTCACCTCTGCAGCCACAG | SEQ ID NO: 3328 | AACACCCTCCTCTCCTTG | SEQ ID NO: 5694 |
| rs2523705 | TGTTGCTGCTAGTTATTATGAGGTAGTTT | SEQ ID NO: 963 | TGTTGCTGCTAGTTATTATGAGGTAGTTC | SEQ ID NO: 3329 | AGCTGGAAGAATAGAGAATTAAAA | SEQ ID NO: 5695 |
| rs885948 | CTGCTGGGGTCAGTGGCTCTA | SEQ ID NO: 964 | CTGCTGGGGTCAGTGGCTCTG | SEQ ID NO: 3330 | CTGCCTTCTAAGGGGATG | SEQ ID NO: 5696 |
| rs2009658 | CCTCTAACACTCTCCAAGTAAAATCACATC | SEQ ID NO: 965 | CCTCTAACACTCTCCAAGTAAAATCACATG | SEQ ID NO: 3331 | GTAGCAGTAATAATATTTGAGGTGA | SEQ ID NO: 5697 |
| rs2517754 | GTTTCCTGAAAGTGTAACTGCTGATCT | SEQ ID NO: 966 | GTTTCCTGAAAGTGTAACTGCTGATCC | SEQ ID NO: 3332 | GGACAGGATCAGGAAACAT | SEQ ID NO: 5698 |
| rs2596499 | ACAGAGGCTCACACATCGCCCA | SEQ ID NO: 967 | ACAGAGGCTCACACATCGCCCT | SEQ ID NO: 3333 | GTCTCTGTGCATTCTGAGACA | SEQ ID NO: 5699 |
| rs929156 | AGGGGGCTGTCTGGCAGGT | SEQ ID NO: 968 | AGGGGGCTGTCTGGCAGGC | SEQ ID NO: 3334 | GTACCTCACTGACTTCCTGTCTT | SEQ ID NO: 5700 |
| rs2076312 | TGCTGCTCTCTGGGCCTCTTTA | SEQ ID NO: 969 | TGCTGCTCTCTGGGCCTCTTTC | SEQ ID NO: 3335 | TAAAATGGGGGTCAGCTAAAT | SEQ ID NO: 5701 |
| rs3093666 | GAGACACGGAGCCCAGCCT | SEQ ID NO: 970 | GAGACACGGAGCCCAGCCC | SEQ ID NO: 3336 | CCAGCTCCCTCTATTTATGTTT | SEQ ID NO: 5702 |
| rs3132520 | GGGCACCAAGGGCCCCCT | SEQ ID NO: 971 | GGGCACCAAGGGCCCCCC | SEQ ID NO: 3337 | CAGGGACCTAGGTATCTAGTTCC | SEQ ID NO: 5703 |
| rs7773175 | TTGTGTGACTGCCTTAAAACTAATGGG | SEQ ID NO: 972 | TTGTGTGACTGGCTAAAACTAATGGC | SEQ ID NO: 3338 | AAAGGGGTTACAAAAATATCAAG | SEQ ID NO: 5704 |
| rs3116956 | CTAGCCGGGCTGGAGTTGAGA | SEQ ID NO: 973 | CTAGCCGGGCTGGAGTTGAGG | SEQ ID NO: 3339 | TTCTTTGGCGCTCTTTCT | SEQ ID NO: 5705 |
| rs3823417 | CTGCCCCTGGAAAAGGTCCCA | SEQ ID NO: 974 | CTGCCCCTGGAAAAGGTCCCG | SEQ ID NO: 3340 | GTTGGGAGTGATTTAGCACTCT | SEQ ID NO: 5706 |
| rs1265092 | GGAGCTCAGTGCGGGGA | SEQ ID NO: 975 | GGAGCTTTCAGTGCGGGGG | SEQ ID NO: 3341 | GTAGTAGCTGACACTGTCCCAG | SEQ ID NO: 5707 |
| rs204889 | GCTTGAGCCACCTCGCCT | SEQ ID NO: 976 | GCTTGAGCCACCTCGCCC | SEQ ID NO: 3342 | GCCTCCTGCTCCATTATTTT | SEQ ID NO: 5708 |
| rs910320 | GTTGGCGACATGATGCATGCA | SEQ ID NO: 977 | GTTGGCGACATGATGCATGCG | SEQ ID NO: 3343 | ATGCCCTCAAAGTCAGCT | SEQ ID NO: 5709 |
| rs2239886 | AGCTCAGCCCAGCCCCTCAA | SEQ ID NO: 978 | AGCTCAGCCCAGCCCCTCAC | SEQ ID NO: 3344 | TTAGAGAGAGCTCACAAAATGTC | SEQ ID NO: 5710 |
| rs2158279 | CATAGATGTCCAATGATAGGAGACTGATA | SEQ ID NO: 979 | CATAGATGTCCAATGATAGGAGACTGATC | SEQ ID NO: 3345 | ATCAAATATAATACATGAACAAAGTG | SEQ ID NO: 5711 |
| rs463260 | GCGATCCACGTGCAAAACTCT | SEQ ID NO: 980 | GCGATCCACGTGCAAAACTCC | SEQ ID NO: 3346 | CTCAGCTGCCACACAGTC | SEQ ID NO: 5712 |
| rs2523713 | CCCCCGTGCCCGGCTTTT | SEQ ID NO: 981 | CCCCCGTGCCCGGCTTTC | SEQ ID NO: 3347 | GCTAGTTTTTGTAGCTCATAGTGA | SEQ ID NO: 5713 |
| rs2072915 | CCAGTATCCACCTCTGGGGGAGT | SEQ ID NO: 982 | CCAGTATCCACCTCTGGGGGAGA | SEQ ID NO: 3348 | CCCCATTTCCACTCTTCAG | SEQ ID NO: 5714 |
| rs2187578 | CCACACTGTCAATGAAAAGAGTCAAACT | SEQ ID NO: 983 | CCACACTGTCAATGAAAAGAGTCAAACG | SEQ ID NO: 3349 | TAAAGAGATTTATTCTGAGCCAA | SEQ ID NO: 5715 |
| rs2246626 | CAGGGCAGATGTTCCCTCACAGA | SEQ ID NO: 984 | CAGGGCAGATGTTCCCTCACAGG | SEQ ID NO: 3350 | TCAGCCCCTGAATATTGG | SEQ ID NO: 5716 |
| rs2517672 | CAGCCATAATCACGAGAGATGTAAGAAT | SEQ ID NO: 985 | CAGCCATAATCACGAGAGATGTAAGAAC | SEQ ID NO: 3351 | ATTTTTCAAACCAACCTTCTAAC | SEQ ID NO: 5717 |
| rs2076489 | ATCGAGCCCCAGGGGGAA | SEQ ID NO: 986 | ATCGAGCCCCAGGGGGAG | SEQ ID NO: 3352 | ACAGCAGCTAAAGCCAGTG | SEQ ID NO: 5718 |
| rs1264322 | ATCTCCACCTGGGGGGGCGA | SEQ ID NO: 987 | ATCTCCACCTGGGGGGGCGG | SEQ ID NO: 3353 | ATCCAGTGGACCTTAGAGCAT | SEQ ID NO: 5719 |
| rs2523970 | GTGCCCAGTGTGTAACAGGCCA | SEQ ID NO: 988 | GTGGCCAGTGTGTAACAGGCCC | SEQ ID NO: 3354 | GTGCTTCAGAGTTGATGACC | SEQ ID NO: 5720 |
| rs2073722 | ACCACGCCTTCTGCTCCACCA | SEQ ID NO: 989 | ACCACGCCTTCTGCTCCACCC | SEQ ID NO: 3355 | GAAATCTGTTCACCGAGTGTT | SEQ ID NO: 5721 |
| rs6915224 | TGAATAGCTCTGTAAGGCACTAAAACAT | SEQ ID NO: 990 | TGAATAGCTCTGTAAGGCACTAAAACAC | SEQ ID NO: 3356 | CTATACATTTACTTTTAGAAATGCA | SEQ ID NO: 5722 |
| rs209130 | GGACTAAAAAGGAAAGAAGCTAACAATGGT | SEQ ID NO: 991 | GGACTAAAAAGGAAAGAAGCTAACAATGGC | SEQ ID NO: 3357 | GTCTATGAAAATGAAATAAACAAAA | SEQ ID NO: 5723 |
| rs5017092 | GGCTGCATGATAAAAATTAAATGATTA | SEQ ID NO: 992 | GGCTGCATGATTTTAAATTAAATGATTC | SEQ ID NO: 3358 | TAAAAATTGTTATCTGAAAATTTCA | SEQ ID NO: 5724 |
| rs3130552 | AGAGGCTCTGAGAGGTGGCCTA | SEQ ID NO: 993 | AGAGGCTCTGAGAGGTGGCCTG | SEQ ID NO: 3359 | CTACAGGGACAAGCACAATC | SEQ ID NO: 5725 |
| rs2247720 | CACCCCTTTCCTGGCCAA | SEQ ID NO: 994 | CACCCCTTTCCTGGCCAG | SEQ ID NO: 3360 | GCCCCAGTAACCTACAAGG | SEQ ID NO: 5726 |
| rs3807036 | AAAGTCCTGCTGCTCCATAAAGAT | SEQ ID NO: 995 | AAAGTCCTGCTGCTCCATAAAGAC | SEQ ID NO: 3361 | TACTGCTGTTATACTGTAATTCTAATT | SEQ ID NO: 5727 |
| rs1049622 | GGGCTGACCGGGTCATGAGT | SEQ ID NO: 996 | GGGCTGACCGGGTCATGAGC | SEQ ID NO: 3362 | TCTGTCTGCGGGTAGAGCT | SEQ ID NO: 5728 |
| rs2179915 | GCCTTTCGAATTAACCCAGTCAGAA | SEQ ID NO: 997 | GCCTTTCGAATTAACCCAGTCAGAC | SEQ ID NO: 3363 | TTAATAAATAAACAAAGCCTCCA | SEQ ID NO: 5729 |
| rs6930217 | CCTTTACGATAGGTCTTGAAGTTAGGTAT | SEQ ID NO: 998 | CCTTTACGATAGGTCTTGAAGTTAGGTAC | SEQ ID NO: 3364 | GTTAGCCATCTTACTTAATTCTTCT | SEQ ID NO: 5730 |
| rs3093553 | AGCTGGGAGCCCCTGAGGGT | SEQ ID NO: 999 | AGCTGGGAGCCCCTGAGGGG | SEQ ID NO: 3365 | AAGGAGAGACAGTCTGCTCTTAC | SEQ ID NO: 5731 |
| rs6457597 | GGGCTATGGGATGGGATAGATAGAT | SEQ ID NO: 1000 | GGGCTATGGGATGGGATAGATAGAC | SEQ ID NO: 3366 | AACCCTTTATTTCCTCGTTTCT | SEQ ID NO: 5732 |
| rs241437 | ACACAGGTATCTTCTACAAATTGTAAGCT | SEQ ID NO: 1001 | ACACAGGTATCTTCTACAAATTGTAAGCC | SEQ ID NO: 3367 | GCTCCTTCAGTAAAAAAGAGAAA | SEQ ID NO: 5733 |
| rs5026740 | CGGTGGCTCAAACCTATAACCCT | SEQ ID NO: 1002 | CGGTGGCTCAAACCTATAACCCA | SEQ ID NO: 3368 | GCATGTTGGGAGGTCAAG | SEQ ID NO: 5734 |
| rs15604 | ATCCGCGGGGAGACAGGCA | SEQ ID NO: 1003 | ATCCGCGGGGAGACAGGCG | SEQ ID NO: 3369 | TTAACGACGACTCACACGAT | SEQ ID NO: 5735 |
| rs2071800 | CCAAGGCCTGCGTTCAGTTGA | SEQ ID NO: 1004 | CCAAGGCCTGCGTTCAGTTGG | SEQ ID NO: 3370 | ACACCAAGGGCTCTTATGAAT | SEQ ID NO: 5736 |
| rs2844522 | ATGGTCTTGAGCTCCAGGGGAG | SEQ ID NO: 1005 | ATGGTCTTGAGCTCCAGGGGAC | SEQ ID NO: 3371 | TGTTTCTTAGTGCCCAGGC | SEQ ID NO: 5737 |
| rs2516409 | GGCCTCACAACCTAATTTTTAAGTTCA | SEQ ID NO: 1006 | GGCCTCACAACCTTTTTTTTTAAGTTCC | SEQ ID NO: 3372 | CTATCCCTGTCATTACTAACTATTCC | SEQ ID NO: 5738 |
| rs7770592 | TCAATCTACTACCTCTTTCGCATAATCAA | SEQ ID NO: 1007 | TCAATCTACTACCTCTTTCGCATAATCAC | SEQ ID NO: 3373 | TCTATCATTCTTATCTGTATAGTCAGC | SEQ ID NO: 5739 |
| rs444013 | GAGGGTGACCACCCTGGGG | SEQ ID NO: 1008 | GAGGGTGACCACCCTGGGC | SEQ ID NO: 3374 | GGTCAAAAAGCTTATTTCTTTTAA | SEQ ID NO: 5740 |
| rs2844846 | CTGTGCCCTCTGGTGAGCCA | SEQ ID NO: 1009 | CTGTGCCCTCTGGTGAGCCT | SEQ ID NO: 3375 | GGGCAACTCTCAAGGGTTT | SEQ ID NO: 5741 |
| rs3757346 | AAAGGGAGCCTGGGGCTGTC | SEQ ID NO: 1010 | AAAGGGAGCCTGGGGCTGTG | SEQ ID NO: 3376 | GGGTGAAGCTGGCCTATTT | SEQ ID NO: 5742 |
| rs3134929 | GAGAATTGCAAGGTGGCTGCCG | SEQ ID NO: 1011 | GAGAATTGCAAGGTGGCTGCCC | SEQ ID NO: 3377 | AGGACCTGGAAACAGGTATTG | SEQ ID NO: 5743 |
| rs401775 | GGAACGTGGGAAGGAACCCA | SEQ ID NO: 1012 | GGAACGTGGGAAGGAACCCG | SEQ ID NO: 3378 | CCTCCAACTTTACCCAGTCTT | SEQ ID NO: 5744 |
| rs6924267 | TGGGCAACAGAGACAGACTCCA | SEQ ID NO: 1013 | TGGGCAACAGAGACAGACTCCG | SEQ ID NO: 3379 | AAAAGAGTTGTTCTATGAACAGCT | SEQ ID NO: 5745 |
| rs2517673 | CTGGTTAGAAGGTTGGTTTGAAAAATA | SEQ ID NO: 1014 | CTGGTTAGAAGGTTGGTTTGAAAAATG | SEQ ID NO: 3380 | TCTTACATCTCTCGTGATTATGG | SEQ ID NO: 5746 |
| rs1736980 | GAATGAACTAATTCAGAAAATCGGTACCA | SEQ ID NO: 1015 | GAATGAACTAATTCAGAAAATCGGTACCG | SEQ ID NO: 3381 | GAGTTGGGTATTACTATAAAAATTCT | SEQ ID NO: 5747 |
| rs1611203 | AAGTCCCAGGGCCTCAGGCA | SEQ ID NO: 1016 | AAGTCCCAGGGCCTCAGGCC | SEQ ID NO: 3382 | GGCTCTCAGGATCTCAGG | SEQ ID NO: 5748 |
| rs7768484 | ACCTGCGGATCGCGCTCCT | SEQ ID NO: 1017 | ACCTGCGGATCGCGCTCCG | SEQ ID NO: 3383 | TACTACAACCAGAGCGAGGG | SEQ ID NO: 5749 |
| rs7741100 | CCCGATCAAACCCCCGGT | SEQ ID NO: 1018 | CCCGATCAATCCCCCGGG | SEQ ID NO: 3384 | ATTTGGGCCTGAACTGAAAAT | SEQ ID NO: 5750 |
| rs2294884 | AAAGTGAACAGGTTGAATTTAATCTCTA | SEQ ID NO: 1019 | AAAGTGAACAGGTTGAATTTAATCTCTC | SEQ ID NO: 3385 | TGTAGTGTCCAGTTCTAAGAGATT | SEQ ID NO: 5751 |
| rs2308935 | CCCACCTTTACAGTATTTCACAGGGT | SEQ ID NO: 1020 | CCCACCTTTACAGTATTTCACAGGGG | SEQ ID NO: 3386 | CCAGAACGCAGAGACTTTATG | SEQ ID NO: 5752 |
| rs2282850 | AGGCGGAGAGAGAGCCGGTT | SEQ ID NO: 1021 | AGGCGGAGAGAGAGCCGGTC | SEQ ID NO: 3387 | GATTACCCTCCCTACCACAAC | SEQ ID NO: 5753 |
| rs2073154 | GGTCAAATGCCATCACGGCG | SEQ ID NO: 1022 | GGTCAAATGCCATCACGGCC | SEQ ID NO: 3388 | ACAACATGGACTCCGTGCT | SEQ ID NO: 5754 |
| rs1265095 | GGGGACAGGAATTCAGGGGAT | SEQ ID NO: 1023 | GGGGACAGGAATTCAGGGGAC | SEQ ID NO: 3389 | CAGAAGGTGCATCTGGCT | SEQ ID NO: 5755 |
| rs3095317 | GGACCTCATTGGGGTTTGGGT | SEQ ID NO: 1024 | GGACCTCATTGGGGTTGGGC | SEQ ID NO: 3390 | CAAGTGTGGAAGAAAAAGCTG | SEQ ID NO: 5756 |
| rs3778630 | GGTCCAATGCACGGGCAT | SEQ ID NO: 1025 | GGTCCAATGCACGGGCAC | SEQ ID NO: 3391 | GAATCTGTTGCTGTAGAACACAG | SEQ ID NO: 5757 |
| rs3869090 | GGGTGATGCGGATGCTCTTTT | SEQ ID NO: 1026 | GGGTGATGCGGATGCTCTTTC | SEQ ID NO: 3392 | CTGCTGTAGCTCTGTGGGTAA | SEQ ID NO: 5758 |
| rs415929 | GTGGCACTGGATCTGGGGGTAT | SEQ ID NO: 1027 | GTGGCACTGGATCTGGGGGTAC | SEQ ID NO: 3393 | CTCCATTAACACATGGGTTG | SEQ ID NO: 5759 |
| rs2747431 | CTACCTTCCCCGATGCCCATCT | SEQ ID NO: 1028 | CTACCTTCCCCGATGCCCATCC | SEQ ID NO: 3394 | AGAATCTTCCTTCTGGGATG | SEQ ID NO: 5760 |
| rs2428507 | CCTCAGCCCTGCCCTGCT | SEQ ID NO: 1029 | CCTCAGCCCTGCCCTGCC | SEQ ID NO: 3395 | AAGGTCTCCTGCTTTCCCT | SEQ ID NO: 5761 |
| rs2295666 | CAACCACCGCACATCCACTGT | SEQ ID NO: 1030 | CAACCACCGCACATCCACTGC | SEQ ID NO: 3396 | CACCTGCTGTCACTGTCG | SEQ ID NO: 5762 |
| rs1233427 | CTGTGACTGGCCAGGGACCT | SEQ ID NO: 1031 | CTGTGACTGGCCAGGGACCC | SEQ ID NO: 3397 | ACACCCCAAGTCAGATGC | SEQ ID NO: 5763 |
| rs7774644 | ACCGCCAGTGCCTTGGGA | SEQ ID NO: 1032 | ACCGCCAGTGCCTTGGGG | SEQ ID NO: 3398 | GGGGATCACAGAAGGTGAC | SEQ ID NO: 5764 |
| rs3095309 | GGAGGGGTGGAGGGGACCA | SEQ ID NO: 1033 | GGAGGGGTGGAGGGGACCG | SEQ ID NO: 3399 | CTGCTTCATAATACATGGCTG | SEQ ID NO: 5765 |
| rs5872 | CCCACCTGTCCTGCAGTTTTTGT | SEQ ID NO: 1034 | CCCACCTGTCCTGCAGTCTTTGA | SEQ ID NO: 3400 | CCTTTCAGGAACCCTGTATG | SEQ ID NO: 5766 |
| rs1033500 | GAGTTGTATATATGGGAAACTTACAAGGAA | SEQ ID NO: 1035 | GAGTTGTATATATGGGPAACTTACAAGGAG | SEQ ID NO: 3401 | TTCTTCAGTTGTTTGTAAACATTT | SEQ ID NO: 5767 |
| rs3763306 | TGGTGTAAGGGAAAGGAGAGAAACTA | SEQ ID NO: 1036 | TGGTGTAAGGGAAAGGAGAGAAACTG | SEQ ID NO: 3402 | GCAATTTATACATTATATAGGGAAGC | SEQ ID NO: 5768 |
| rs635688 | TTTTTCTGTGGTTCTGACCTAACATTTT | SEQ ID NO: 1037 | TTTTTCTGTGGTTCTGACCTAACATTTC | SEQ ID NO: 3403 | TTATAAAACAGCCTATGGACATG | SEQ ID NO: 5769 |
| rs4151669 | CTTGTGCCAATGGGGATGCCT | SEQ ID NO: 1038 | CTTGTGCCAATGGGGATGCCC | SEQ ID NO: 3404 | CAGAGGTATGAGACATCGAGGTA | SEQ ID NO: 5770 |
| rs2076527 | TGGAGCTGTTCTTAGAGATGACATTA | SEQ ID NO: 1039 | TGGAGCTGTTCTTAGAGATGACATTG | SEQ ID NO: 3405 | CATTGTGTTTTGTCCACTCTATT | SEQ ID NO: 5771 |
| rs3178162 | CGGATCTGGTCGGTGATGGTT | SEQ ID NO: 1040 | CGGATCTGGTCGGTGATGGTG | SEQ ID NO: 3406 | AGGAGCAAGGGTTGACTGTAG | SEQ ID NO: 5772 |
| rs241449 | AGTCCATCAGCCGCTGCTGA | SEQ ID NO: 1041 | AGTCCATCAGCCGCTGCTGC | SEQ ID NO: 3407 | GAATAGAGGTCCTGTCCCTC | SEQ ID NO: 5773 |
| rs4435981 | CTGCTCCCTGCTGCAAAAAACA | SEQ ID NO: 1042 | CTGCTCCCTGCTGCAAAAAACG | SEQ ID NO: 3408 | TGGCAAGATCCTGATTGC | SEQ ID NO: 5774 |
| rs6456897 | TGGCATAGTAGAAAAGAAACAAGAATGATA | SEQ ID NO: 1043 | TGGCATAGTAGAAAAGAAACAAGAATGATG | SEQ ID NO: 3409 | TAGAAAATCTAGATTTAGTCCACTTC | SEQ ID NO: 5775 |
| rs3828923 | CATTCACACCCACCCACCAT | SEQ ID NO: 1044 | CATTCACACCCACCCACCAC | SEQ ID NO: 3410 | CTTGAAAGCCTCTGGAATCT | SEQ ID NO: 5776 |
| rs2179920 | AATGTGGTTAACACATTAGTGGACTCT | SEQ ID NO: 1045 | AATGTGGTTAACACATTAGTGGACTCC | SEQ ID NO: 3411 | CAAAATTCATATTTAATTTAAACTGAA | SEQ ID NO: 5777 |
| rs3218806 | GCTCACCACCAAGTCGCCAT | SEQ ID NO: 1046 | GCTCACCACCAAGTCGCCAG | SEQ ID NO: 3412 | CTCCAGGCACTTCTACTTTCC | SEQ ID NO: 5778 |
| rs2076175 | GCTTCTGCCCACTGTCCCCA | SEQ ID NO: 1047 | GCTTCTGCCCACTGTCCCCG | SEQ ID NO: 3413 | CTGTCACAGAGCAGGAAGAG | SEQ ID NO: 5779 |
| rs3871246 | GGGGAGCATCATGGCACACA | SEQ ID NO: 1048 | GGGGAGCATCATGGCACACG | SEQ ID NO: 3414 | CAACCAGAGCCAAGGTGAT | SEQ ID NO: 5780 |
| rs2281388 | ATCTGGGCCAGCCCAACACCT | SEQ ID NO: 1049 | ATCTGGGCCAGCCCAACACCC | SEQ ID NO: 3415 | CGTCTGCCATGTTGACAAGT | SEQ ID NO: 5781 |
| rs3763314 | TGAATGGGCTCATATAAGTTTCCTTAA | SEQ ID NO: 1050 | TGAATGGGCTCATATAAGTTTCCTTAG | SEQ ID NO: 3416 | CATATTTTTTATAAAGCAAATGGG | SEQ ID NO: 5782 |
| rs6913173 | CAATACACAAACCTTTACAGTATTCAGAT | SEQ ID NO: 1051 | CAATACACAAACCTTTACAGTATTCAGAC | SEQ ID NO: 3417 | TAGTCATGTCTAGATTTGAGGAGA | SEQ ID NO: 5783 |
| rs3873408 | CTCATGGGGGCAGGTGCAGT | SEQ ID NO: 1052 | CTCATGGGGGCAGGTGCAGC | SEQ ID NO: 3418 | ATTCCACCAGCTGTGTAGTTT | SEQ ID NO: 5784 |
| rs3997995 | AGAAGGCTGTGGGGGGCCA | SEQ ID NO: 1053 | AGAAGGCTGTGGGGGGCCG | SEQ ID NO: 3419 | ATTTGGTGTTGAGTCCATCAT | SEQ ID NO: 5785 |
| rs2523924 | CAATGGTACCTTCCATATAGCATATAGT | SEQ ID NO: 1054 | CAATGGTACCTTCCATATAGCATATAGTTC | SEQ ID NO: 3420 | TCAGAAAGTAACAAAAAGAAGAAG | SEQ ID NO: 5786 |
| rs2239517 | GGGGGAAGGTGCAGGCCA | SEQ ID NO: 1055 | GGGGGAAGGTGCAGGCCG | SEQ ID NO: 3421 | CTCTTCAGCTTCTCCTTGTTCT | SEQ ID NO: 5787 |
| rs3094225 | CTGCTGCAACTCAAGGCTCACA | SEQ ID NO: 1056 | CTGCTGCAACTCAAGGCTCACG | SEQ ID NO: 3422 | CTGTGACCGGTGGTGGTAG | SEQ ID NO: 5788 |
| rs3869117 | CATGTAAAATTTATCTTTAATTCCCAATGG | SEQ ID NO: 1057 | CATGTAAAATTTATCTTTAATTCCCAATGC | SEQ ID NO: 3423 | ATTTTATTAACTTGACTGTGGAATT | SEQ ID NO: 5789 |
| rs3734837 | TGGGCTTGAGTGGGCAGCTT | SEQ ID NO: 1058 | TGGGCTTGAGTGGGCAGCTC | SEQ ID NO: 3424 | AGTGGGTTCAAAGAGCTGAGT | SEQ ID NO: 5790 |
| rs2524180 | CTGTTAAAGCAACTGACTGCTAAAGAT | SEQ ID NO: 1059 | CTGAAAAAGCAACTGACTGCTAAAGAC | SEQ ID NO: 3425 | ATGAAGTCTCTGACGAAAAA | SEQ ID NO: 5791 |
| rs2844504 | ACCCCCACCCAGACCCAAA | SEQ ID NO: 1060 | ACCCCCACCCAGACCCAAC | SEQ ID NO: 3426 | CAGGCTCTAGTCCAACGG | SEQ ID NO: 5792 |
| rs2206618 | GCATTTCAGTGGTATTTTCCATTTTTGT | SEQ ID NO: 1061 | GCATTTCAGTGGTATTTTCCATTTTTGC | SEQ ID NO: 3427 | GCAACTCTATTAACATCTTGAT | SEQ ID NO: 5793 |
| rs406424 | AGGAAAGGGAGAGAGAGGAAAGAAAT | SEQ ID NO: 1062 | AGGAAAGGGAGAGAGAGGAAAGAAAG | SEQ ID NO: 3428 | AGGAAGGAAATCAAATTCATATC | SEQ ID NO: 5794 |
| rs3830038 | CTCTTCCCCCACCCCACTGAA | SEQ ID NO: 1063 | CTCTTCCCCCACCCCACTGAT | SEQ ID NO: 3429 | ATCCTCCTAAGGGAGCTGG | SEQ ID NO: 5795 |
| rs1048709 | ACCTGCCAAGTGAATGGCCGA | SEQ ID NO: 1064 | ACCTGCCAAGTGAATGGCCGG | SEQ ID NO: 3430 | AGACAGCGATCTGTGACAAC | SEQ ID NO: 5796 |
| rs3093661 | CACCCAAGGGGAAATGGAGACA | SEQ ID NO: 1065 | CACCCAAGGGGAAATGGAGACG | SEQ ID NO: 3431 | AGATGGGATGGGTGAAAGAT | SEQ ID NO: 5797 |
| rs2252856 | GAAGGGCCAACCCCCCCA | SEQ ID NO: 1066 | GAAGGGCCAACCCCCCCG | SEQ ID NO: 3432 | TAGGAGGTGCAGGGTAGGA | SEQ ID NO: 5798 |
| rs2857177 | CAAATCAATGGATTAAATAACCTAGTTGAA | SEQ ID NO: 1067 | CAAATCAATGGATTAAATAACCTAGTTGAG | SEQ ID NO: 3433 | TATTGGAAAGTAGATGAACAGTAATT | SEQ ID NO: 5799 |
| rs9968 | AGGGCCCCAGTGCCATCTC | SEQ ID NO: 1068 | AGGGCCCCAGTGCCATCTG | SEQ ID NO: 3434 | TTGGGCCTCAGAACTCTG | SEQ ID NO: 5800 |
| rs365052 | GTTCCGGATCTGGGCGCG | SEQ ID NO: 1069 | GTTCCGGATCTGGGCGCC | SEQ ID NO: 3435 | AATGACAAACTAAGCGCGG | SEQ ID NO: 5801 |
| rs1800624 | CCTTCATGATGCAGGCCCAAA | SEQ ID NO: 1070 | CCTTCATGATGCAGGCCCAAT | SEQ ID NO: 3436 | AGTCTGGCCTGAACCCTATT | SEQ ID NO: 5802 |
| rs2856715 | TGCAACACTCTCTCACTTTACCTTGTTT | SEQ ID NO: 1071 | TGCAACACTCTCTCACTTTACCTTGTTC | SEQ ID NO: 3437 | AGAGTTTGTAATTATATGTTTGTGG | SEQ ID NO: 5803 |
| rs3130444 | GTGAGACCCCATTCCTACAAAAT | SEQ ID NO: 1072 | GTGAGACCCCATTCCTACAAAAC | SEQ ID NO: 3438 | ATGCTGGTGTGTACCTGTAAAG | SEQ ID NO: 5804 |
| rs2071551 | CGCTGCAAGGTCGTGCGT | SEQ ID NO: 1073 | CGCTGCAAGGTCGTGCGC | SEQ ID NO: 3439 | GTAGTTGTGTCTGCACACCTT | SEQ ID NO: 5805 |
| rs2301221 | TTTCATCACACAGGTACTAAGCATTCTA | SEQ ID NO: 1074 | TTTCATCACACAGGTACTAAGCATTCTG | SEQ ID NO: 3440 | ACTTTTCTTACATTTATATTTTGATTT | SEQ ID NO: 5806 |
| rs6927322 | GGAGCCAGGGCTCAGCCAT | SEQ ID NO: 1075 | GGAGCCAGGGCTCAGCCAG | SEQ ID NO: 3441 | CTGATGACCTCTGTCAAAGCT | SEQ ID NO: 5807 |
| rs7768179 | GGAATTCCCGGATGAAAAGTGAAA | SEQ ID NO: 1076 | GGAATTCCCGGATGAAAAGTGAAG | SEQ ID NO: 3442 | GAGGGTTTCTTCCTGGTTT | SEQ ID NO: 5808 |
| rs6913646 | GTCTACACCAGCCATGTGGAA | SEQ ID NO: 1077 | GTCTACACCAGCCATGTGGAG | SEQ ID NO: 3443 | CTCCTCACAGTAGAGTGGTGTAG | SEQ ID NO: 5809 |
| rs2256820 | GCTTCTGCCCACTGTCCCCA | SEQ ID NO: 1078 | GCTTCTGCCCACTGTCCCCG | SEQ ID NO: 3444 | CCTTTCTGCCTGTTGAAGAG | SEQ ID NO: 5810 |
| rs4713410 | GAGGCATGGCACTGCCATGT | SEQ ID NO: 1079 | GAGGCATGGCACTGCCATGG | SEQ ID NO: 3445 | GGACCACCTGAGAAAGACA | SEQ ID NO: 5811 |
| rs872956 | TTTAGCATCTAACAATGTTCGACATATA | SEQ ID NO: 1080 | TTTAGCATCTAACAATGTTCGACATATT | SEQ ID NO: 3446 | TAGGCTTTTGATACTATTTTTTTACT | SEQ ID NO: 5812 |
| rs4959077 | CCAACTCACCCCACGTGGAT | SEQ ID NO: 1081 | CCAACTCACCCCACCTGGAC | SEQ ID NO: 3447 | CTAGTGAGCCCGAGAGACAG | SEQ ID NO: 5813 |
| rs2071282 | AGGAGGTGCCTTTGGGGCAGA | SEQ ID NO: 1082 | AGGAGGTGCCTTTGGGGCAGG | SEQ ID NO: 3448 | GAAGCACTCGTTGACATCAC | SEQ ID NO: 5814 |
| rs1264328 | AGAGGCCCCCTGTGTCCCT | SEQ ID NO: 1083 | AGAGGCCCCCTGTGTCCCC | SEQ ID NO: 3449 | CCAAATGACCCTCAACCATC | SEQ ID NO: 5815 |
| rs3918149 | GCGCCTGCGCTGTGTGTA | SEQ ID NO: 1084 | GCGCCTGCGCTGTGTGTG | SEQ ID NO: 3450 | ATGCTGAACTCGTATGGAGAG | SEQ ID NO: 5816 |
| rs2157051 | AAGAGTTCTGATGAGTGCAAAACAGA | SEQ ID NO: 1085 | AAGAGTTCTGATGAGTGCAATTTCAGG | SEQ ID NO: 3451 | CAAAATACTATTCTTATTGCAAGAA | SEQ ID NO: 5817 |
| rs7750514 | AGGGACGGGGCCCAAGCT | SEQ ID NO: 1086 | AGGGACGGGGCCCAAGCC | SEQ ID NO: 3452 | AGGGTTTCTTCCTGGTTTCTC | SEQ ID NO: 5818 |
| rs3128964 | TCAGCTGTCACATAATAAGCTAAGGAAGA | SEQ ID NO: 1087 | TCAGCTGTCACATAATAAGCTAAGGAAGG | SEQ ID NO: 3453 | AGGACCCTTTATCTGTCTTATTTT | SEQ ID NO: 5819 |
| rs6912877 | GAGTGAGCCATGTGGATCCCTA | SEQ ID NO: 1088 | GAGTGAGCCATGTGGATCCCTG | SEQ ID NO: 3454 | AAGTGCATGTGGGAGTACC | SEQ ID NO: 5820 |
| rs1541268 | TTTGCCACTGTTTGCTGTGGGT | SEQ ID NO: 1089 | TTTGCCACTGTTTGCTGTGGGC | SEQ ID NO: 3455 | GTGTGATCTTGTGAGATATATATATAA | SEQ ID NO: 5821 |
| rs6906175 | AGGGCAGGCAGGGCCCTGC | SEQ ID NO: 1090 | AGGGCAGGCAGGGCCCTGG | SEQ ID NO: 3456 | CGTGCTTATGAAGTTGGAGC | SEQ ID NO: 5822 |
| rs2074506 | GCCCCCTTCCATCCCCAGT | SEQ ID NO: 1091 | GCCCCCTTCCATCCCCAGG | SEQ ID NO: 3457 | GCTGCAGGAAAAGCTGAGA | SEQ ID NO: 5823 |
| rs2239523 | GGTAGAGGGAATGGGAGAGACCAGC | SEQ ID NO: 1092 | GGTAGAGGGAATGGGAGAGACCAGG | SEQ ID NO: 3458 | ACAGAGCTGCCTTTGTGAG | SEQ ID NO: 5824 |
| rs2242665 | GGAGCGCCGGTGGAGTAAT | SEQ ID NO: 1093 | GGAGCGCCGGTGGAGTAAC | SEQ ID NO: 3459 | TTGGTCCATGGAAAGCAG | SEQ ID NO: 5825 |
| rs3131300 | AGGGAGGGTCAGTGGGGTTGA | SEQ ID NO: 1094 | AGGGAGGGTCAGTGGGGTTGG | SEQ ID NO: 3460 | ACAGACTGAGGACCAGCAC | SEQ ID NO: 5826 |
| rs465223A | GGATCCCCGGCACCCAG | SEQ ID NO: 1095 | AGGATCCCCGGCACCCAC | SEQ ID NO: 3461 | TCTCTTCCACTGCATTCCC | SEQ ID NO: 5827 |
| rs3819299 | GGAGGAGCTCACCCACCCCA | SEQ ID NO: 1096 | GGAGGAGCTCACCCACCCCC | SEQ ID NO: 3462 | AATTCCTCCTGTCCCACGT | SEQ ID NO: 5828 |
| rs2844524 | TCGCTTACATAACCCAGGGCGT | SEQ ID NO: 1097 | TCGCTTACATAACCCAGGGCGG | SEQ ID NO: 3463 | AGTTTTTGCGACGGAGTTTT | SEQ ID NO: 5829 |
| rs6915440 | AGGGGCCTGGGGCAACGA | SEQ ID NO: 1098 | AGGGGCCTGGGGCAACGG | SEQ ID NO: 3464 | CATATCTCCCGAACCATATATTT | SEQ ID NO: 5830 |
| rs1614309 | CAACAAACATCATCTACCGCAGTTTT | SEQ ID NO: 1099 | CAACAAACATCATCTACCGGAGTTTC | SEQ ID NO: 3465 | AAGGTTTCCCTGAGTGCTTC | SEQ ID NO: 5831 |
| rs2076183 | GCCCTGACCGATACTTGGGCA | SEQ ID NO: 1100 | GCCCTGACCGATACTTGGGCG | SEQ ID NO: 3466 | AGAGAGAAACGGCCTCTGT | SEQ ID NO: 5832 |
| rs3763311 | TGGGCTTTTTGTTTTTTTAATTCATTCA | SEQ ID NO: 1101 | TGGGCTTTTTGTTTTTTTAATTCATTCG | SEQ ID NO: 3467 | GTTTTTAAGTCTATTCTAAAAGGCC | SEQ ID NO: 5833 |
| rs3097650 | TGAAGGTGGAAAACAAAAGAAGTACAT | SEQ ID NO: 1102 | TGAAGGTGGAAAACATTTAAGAAGTACAC | SEQ ID NO: 3468 | TTCTACAAGAGATATTTATGGAGGA | SEQ ID NO: 5834 |
| rs2743945 | ACCCTGGGCTGCTGCCCAA | SEQ ID NO: 1103 | ACCCTGGGCTGCTGCCCAC | SEQ ID NO: 3469 | CCATCCTGAGTCTTGTTTTTATT | SEQ ID NO: 5835 |
| rs1737087 | CCACAGGCCCCCTCAGGA | SEQ ID NO: 1104 | CCACAGGCCCCCTCAGGG | SEQ ID NO: 3470 | ATAGGGAGGAGGCCAATG | SEQ ID NO: 5836 |
| rs1811165 | CCCAGAGTCACAAACTGTTATGTCAA | SEQ ID NO: 1105 | CCCAGAGTCACAAACTGTTATGTCAG | SEQ ID NO: 3471 | TCAGTTAGAAGTTGTATTAGTCTGTT | SEQ ID NO: 5837 |
| rs3828913 | AGGGCGGGGCCACGTTCAT | SEQ ID NO: 1106 | AGGGCGGGGCCACGTTCAG | SEQ ID NO: 3472 | AGAGAAAATTCTAGCGGCCT | SEQ ID NO: 5838 |
| rs3763312 | TGAAAAATACAAACTTCAGAGTGAAAGAAA | SEQ ID NO: 1107 | TGAAAAATACAAACTTCAGAGTGAAAGAAG | SEQ ID NO: 3473 | CTAAGACTTATTATATGTGATGTGTCA | SEQ ID NO: 5839 |
| rs2269711 | CACCTCTCCCCACCAGGTGA | SEQ ID NO: 1108 | CACCTCTCCCCACCAGGTGT | SEQ ID NO: 3474 | GGAGAGGTGAGATGAGCAG | SEQ ID NO: 5840 |
| rs2243873 | TCTGATTAGCAGCAGTTATAAGTAGGGT | SEQ ID NO: 1109 | TCTGATTAGCAGCAGTTATAAGTAGGGG | SEQ ID NO: 3475 | TTTGTTTTTGAAGACAGAACAC | SEQ ID NO: 5841 |
| rs2072108 | GCAGGCTCTGGGTCATGATA | SEQ ID NO: 1110 | GCAGGCTCTGGGTCATGATG | SEQ ID NO: 3476 | CTGGGCTGGAGGACTAAAATA | SEQ ID NO: 5842 |
| rs7770882 | GCTGAAAATTTTTTGGAATATCAGTTGATA | SEQ ID NO: 1111 | GCTGAAAATTTTTTGGAATATCAGTTGATG | SEQ ID NO: 3477 | AACATGTACTTGTATGCAATTGC | SEQ ID NO: 5843 |
| rs1736935 | CAGAGGAAAGAATTCCAAAGCAGCA | SEQ ID NO: 1112 | CAGAGGAAAGAATTCCAAAGCAGCG | SEQ ID NO: 3478 | AACTCTTAGGTTTAAACACATT | SEQ ID NO: 5844 |
| rs3823420 | ACCCCACCCGACCCCCAAT | SEQ ID NO: 1113 | ACCCCACCCGACCCCCAAC | SEQ ID NO: 3479 | CTATGGCAATGATTTATTCATGT | SEQ ID NO: 5845 |
| rs2071571 | GGAAAGTCCGGGTGGCCTCA | SEQ ID NO: 1114 | GGAAAGTCCGGGTGGCCTCG | SEQ ID NO: 3480 | CAGCATAACCCGCTAAGTTG | SEQ ID NO: 5846 |
| rs3093726 | GACGTGGTGGCATGCACCT | SEQ ID NO: 1115 | GACGTGGTGGCATGCACCC | SEQ ID NO: 3481 | TAATCCTACCACTTTGCAAGG | SEQ ID NO: 5847 |
| rs973233 | GTCAGGGACAGGGTCGGGGT | SEQ ID NO: 1116 | GTCAGGGACAGGGTCGGGGG | SEQ ID NO: 3482 | GGGACTCAGGATGCTTGGT | SEQ ID NO: 5848 |
| rs1150772 | GTGAGGAGTGGGCAGCAAGGAC | SEQ ID NO: 1117 | GTGAGGAGTGGGCAGCAAGGAG | SEQ ID NO: 3483 | CACCTGCTCTGTCCTCATC | SEQ ID NO: 5849 |
| rs1264301 | GCCTGCGAGAGAAGCAGGCT | SEQ ID NO: 1118 | GCCTGCGAGAGAAGCAGGCG | SEQ ID NO: 3484 | CTGAGATAGCAGGGGAGAG | SEQ ID NO: 5850 |
| rs367398 | AGCCCCTTCTCCAAGCCCCA | SEQ ID NO: 1119 | AGCCCCITCTCCAAGCCCCG | SEQ ID NO: 3485 | TCCCTGTCCCTCTTCAGG | SEQ ID NO: 5851 |
| rs241451 | CACCCCACCCCACCTCTCT | SEQ ID NO: 1120 | CACCCCACCCCACCTCTCC | SEQ ID NO: 3486 | ACACAGTGTCCAAATCTCCAT | SEQ ID NO: 5852 |
| rs2076528 | TGTTAAATAGAGTGGACAAAACACAATGAA | SEQ ID NO: 1121 | TGTTAAATAGAGTGGACAAAACACAATGAC | SEQ ID NO: 3487 | ATGTCATCTCTAAGAACAGCTCC | SEQ ID NO: 5853 |
| rs3115615 | TCTGCTGTGCAAGATAATTTCATCTTC | SEQ ID NO: 1122 | TCTGCTGTGCAAGATAATTTCATCTTG | SEQ ID NO: 3488 | AAAGATTTGATGTTACATTTTAC | SEQ ID NO: 5854 |
| rs2228088 | CCCCAGGGCTCCAGGCGT | SEQ ID NO: 1123 | CCCCAGGGCTCCAGGCGG | SEQ ID ND: 3489 | GCTTGTTCCTCAGCCTCTT | SEQ ID NO: 5855 |
| rs2269611 | ACTGCCCCCCTCCCATCCT | SEQ ID NO: 1124 | ACTGCCCCCCTCCCATCCC | SEQ ID NO: 3490 | ACCATCATCGCACAGCTC | SEQ ID NO: 5856 |
| rs408036 | GCTGGGGATTGGCAGCCA | SEQ ID NO: 1125 | GCTGGGGATTGGCAGCCG | SEQ ID NO: 3491 | AGGTGTGTCTTGCTCCATTT | SEQ ID NO: 5857 |
| rs3130998 | CCGCCCACGTGGACTGGT | SEQ ID NO: 1126 | CCGCCCACGTGGACTGGC | SEQ ID NO: 3492 | CTCCTGGCTACTCTCTCCTGT | SEQ ID NO: 5858 |
| rs2022537 | AAAGGTACAAAAAGTCACAAATTGAAACT | SEQ ID NO: 1127 | AAAGGTACAAAAAGTCACAAATTGAAACC | SEQ ID NO: 3493 | GAAAAAACTGAAGAAACAAAATTTT | SEQ ID NO: 5859 |
| rs2239520 | ACCATGCCGTCCCCAGAGGT | SEQ ID NO: 1128 | ACCATGCCGTCCCCAGAGGC | SEQ ID NO: 3494 | GAGTTGGTTTTGGGAATGTG | SEQ ID NO: 5860 |
| rs4993139 | TTCATGCATTTTACATCTAGATCTTCACA | SEQ ID NO: 1129 | TTCATGCATTTTACATCTAGATCTTCACG | SEQ ID NO: 3495 | TGACTTGTTTAATGTTACAAAAGG | SEQ ID NO: 5861 |
| rs3094215 | GGCCCATCGTCTCGCACTCT | SEQ ID NO: 1130 | GGCCCATCGTCTCGCACTCC | SEQ ID NO: 3496 | AGCTCCCACTCTGTGTCAG | SEQ ID NO: 5862 |
| rs1063379 | CCCTAGGCCCCTTGTCATCTTCA | SEQ ID NO: 1131 | CCCTAGGCCCCTTGTCATCTTCG | SEQ ID NO: 3497 | CTCGATGCTTCTCTGCCTT | SEQ ID NO: 5863 |
| rs259942 | TTGCTGTTCTCATGATAGTGAATTTTCA | SEQ ID NO: 1132 | TTGCTGTTCTCATGATAGTGAATTTTCG | SEQ ID NO: 3498 | TGAGATTTTGTAGTGAGATTTGG | SEQ ID NO: 5864 |
| rs3734861 | TGTATCCCTTCCTTCTCTCCTAGTACCT | SEQ ID NO: 1133 | TGTATCCCTTCCTTCTCTCCTAGTACCC | SEQ ID NO: 3499 | TAAAGCAAATGATTAGCCCC | SEQ ID NO: 5865 |
| rs2499 | TCTTCCTTCCCTATTAAAATTAGAACCTT | SEQ ID NO: 1134 | TCTTCCTTCCCTATTAAAATTAGAACCTG | SEQ ID NO: 3500 | GTATAAATTTACTTTCTCAAATTCTTG | SEQ ID NO: 5866 |
| rs4713250 | GTCTTCAATGATTTCAGCTGGGCA | SEQ ID NO: 1135 | GTCTTCAATGATTTCACCTGGGCC | SEQ ID NO: 3501 | GTTGTTTGTTTTGAGCTGCTG | SEQ ID NO: 5867 |
| rs2269426 | CTGGAGCCCCCAGAGCCTA | SEQ ID NO: 1136 | CTGGAGCCCCCAGAGCCTG | SEQ ID NO: 3502 | GCTCAGCTGCTCTAGCCC | SEQ ID NO: 5858 |
| rs887467 | GGAAGGGAAGGCTGGGCTGAC | SEQ ID NO: 1137 | GGAAGGGAAGGCTGGGCTGAG | SEQ ID NO: 3503 | CTGCTCATCTCACCTCTCC | SEQ ID NO: 5869 |
| rs2269712 | ACAAGGGGTGGGTGCCTGGA | SEQ ID NO: 1138 | ACAAGGGGTGGGTGCCTGGG | SEQ ID NO: 3504 | CTGGATATGAGCCCAGTCAG | SEQ ID NO: 5870 |
| rs2302396 | GGCCACACCAACTTCCCCT | SEQ ID NO: 1139 | GGCCACACCAACTTCCCCC | SEQ ID NO: 3505 | CTCCACCTCTCCTCCTCTC | SEQ ID NO: 5871 |
| rs2008560 | GGCTAGGGCCGTGCTGGC | SEQ ID NO: 1140 | GGCTAGGGCCGTGCTGGG | SEQ ID NO: 3506 | ATTCTCCGCAGAGGATTTCT | SEQ ID NO: 5872 |
| rs1480383 | TCCAGAAAAAAAATTATTGAAAAGAGCA | SEQ ID NO: 1141 | TCCAGAAAAAAAATTATTGAAAAGAGCC | SEQ ID ND: 3507 | TAAATATACAAAATATCAAAGCAGTC | SEQ ID NO: 5873 |
| rs3129997 | ATGGGCCACCTGGGTGCCG | SEQ ID NO: 1142 | ATGGGCCACCTGGGTGCCC | SEQ ID NO: 3508 | CTTTGTGCTCCATGTCATCT | SEQ ID NO: 5874 |
| rs2517588 | TGCAGGTTATAACCAGCATTTTTAAAAT | SEQ ID NO: 1143 | TGCAGGTTATAACCAGCATTTTTAAAAC | SEQ ID NO: 3509 | GACTGTAATTTAAAAATCAGAATATAT | SEQ ID NO: 5875 |
| rs465474 | CACTTGTTTTCCGTCGACGTGATT | SEQ ID NO: 1144 | CACTTGTTTTCCGTCGACGTGATC | SEQ ID NO: 3510 | CTCCTGGTCGTGGTTGACT | SEQ ID NO: 5876 |
| rs3218812 | CCGCCTGGGAGCAGCTGT | SEQ ID NO: 1145 | CCGCCTGGGAGCAGCTGG | SEQ ID NO: 3511 | CTCAGCAGCCCTGTACTTTC | SEQ ID NO: 5877 |
| rs2523791 | GCAGCAGCTCAAAACAAACAACAT | SEQ ID NO: 1146 | GCAGCAGCTCAAAACAAACAACAC | SEQ ID NO: 3512 | CCCAGGTGAAATCATTGAAG | SEQ ID NO: 5878 |
| rs3828912 | ACCTGGCGGCCAGAAAAGGT | SEQ ID NO: 1147 | ACCTGGCGGCCAGAAAAGGG | SEQ ID NO: 3513 | AGCCAAAATCAAGGACCAG | SEQ ID NO: 5879 |
| rs2517444 | CCACGCCCGGCCTCTTCT | SEQ ID NO: 1148 | CCACGCCCGGCCTCTTCC | SEQ ID NO: 3514 | TTCTTCCTGCTATATCTATCGTTT | SEQ ID NO: 5880 |
| rs2257347 | GACCCATGGCCTGCCCCA | SEQ ID NO: 1149 | GACCCATGGCCTGCCCCG | SEQ ID NO: 3515 | GTAGCAGTGGCTGTAGGGAG | SEQ ID NO: 5881 |
| rs364950 | GGCGTCTGCCTGAGTTTGGT | SEQ ID NO: 1150 | GGCGTCTGCCTGAGTTTGGC | SEQ ID NO: 3516 | ACTTTGCCCGCTTTGAC | SEQ ID NO: 5882 |
| rs2006164 | GCCGCAGGAAGCTTCAGGT | SEQ ID NO: 1151 | GCCGCAGGAAGCTTCAGGC | SEQ ID NO: 3517 | TGGCCTGGTGGAGTTAG | SEQ ID NO: 5883 |
| rs2857172 | TGAAAAGTAGATAGTTGAGTAAAGCTCATT | SEQ ID NO: 1152 | TGAAAAGTAGATAGTTGAGTAAAGCTCATC | SEQ ID NO: 3518 | AATTATTTAATCAGCTACTTCCATT | SEQ ID NO: 5884 |
| rs3873243 | TTTAGCCAGGGTAACAGAGTGACGA | SEQ ID NO: 1153 | TTTAGCCAGGGTAACAGAGTGACGC | SEQ ID NO: 3519 | ATAAAAAAATTAATAATAAAGGGAGTG | SEQ ID NO: 5885 |
| rs3763327 | TCTGTTGTTTTTCTCAAAATTTCTATAGAC | SEQ ID NO: 1154 | TCTGTTGTTTTTCTCAAAATTTCTATAGAG | SEQ ID NO: 3520 | GATGATAAAAATCTAAGAGAAGCTAA | SEQ ID NO: 5886 |
| rs1061801 | CGGGGGTGGCGGGGAGAA | SEQ ID NO: 1155 | CGGGGGTGGCGGGGAGAG | SEQ ID NO: 3521 | CAGGGTAGAAATAAAGAGCGC | SEQ ID NO: 5887 |
| rs4713519 | TGTGGTAAGCACTTAATAATTATCAGCTA | SEQ ID NO: 1156 | TGTGGTAAGCACTTAATAATTATCAGCTC | SEQ ID NO: 3522 | TACTGTTATTACTTTTGCATAATAAGA | SEQ ID NO: 5888 |
| rs909722 | CTCTTGGACCGCAGCGGAT | SEQ ID NO: 1157 | CTCTTGGACCGCAGCGGAA | SEQ ID NO: 3523 | AGGAGGAACATGCAGAGCT | SEQ ID NO: 5889 |
| rs2213569 | AAATTGCTAAGACAGATTTTAAATATTCAT | SEQ ID NO: 1158 | AAATTGCTAAGACAGATTTTAAATATTCAC | SEQ ID NO: 3524 | CCACATAAAAAAATAAGTATGTGAA | SEQ ID NO: 5890 |
| rs644827 | CTGCCGCAGGAAGATGAGCAT | SEQ ID NO: 1159 | CTGCCGCAGGAAGATGAGCAC | SEQ ID NO: 3525 | AGCAGCAGGATGGCTTC | SEQ ID NO: 5891 |
| rs3763341 | AAATGCACCACTCTTAGTTATGTATAGGT | SEQ ID NO: 1160 | AAATGCACCACTCTTAGTTATGTATAGGC | SEQ ID NO: 3526 | AGTCCAAAGATAAAGAAAACC | SEQ ID NO: 5892 |
| rs2254287 | AGGGGCTCGGGAGCTGGAC | SEQ ID NO: 1161 | AGGGGCTCGGGAGCTGGAG | SEQ ID NO: 3527 | AGGGAAGGCAGTGAAGAGAG | SEQ ID NO: 5893 |
| rs769178 | GAGGGTGACCCAAGGCCCTATA | SEQ ID NO: 1162 | GAGGGTGACCCAAGGCCCTATC | SEQ ID NO: 3528 | AGGTCACCCCAAAGGGT | SEQ ID NO: 5894 |
| rs2270190 | GCCCAGGTGTCCTGGCTCA | SEQ ID NO: 1163 | GCCCAGGTGTCCTGGCTCG | SEQ ID NO: 3529 | AGCTCATCCCTGGTTGC | SEQ ID NO: 5895 |
| rs986521 | CCGGGCAATGAGATACCACACA | SEQ ID NO: 1164 | CCGGGCAATGAGATACCACACG | SEQ ID NO: 3530 | CCTTAAACCCACCAGCTC | SEQ ID NO: 5896 |
| rs206775 | TTCAAGTATTTTTGTGTCCTTGTACAGTAA | SEQ ID NO: 1165 | TTCAAGTATTTTTGTGTCCTTGTACAGTAC | SEQ ID NO: 3531 | AATATTTCTTTCATCTCTTTGCC | SEQ ID NO: 5897 |
| rs241447 | GTGGGCGCGCTGAACTGT | SEQ ID NO: 1166 | GTGGGCGCGCTGAACTGC | SEQ ID NO: 3532 | GAGCAATCACCAGCACTGT | SEQ ID NO: 5898 |
| rs2157336 | TTTTTATTGTTTTTTCAGTGTGGCA | SEQ ID NO: 1167 | TTTTTATTGTTTTTTCAGTGTGGCG | SEQ ID NO: 3533 | TTATTTACAAACTCTGACTTATAATG | SEQ ID NO: 5899 |
| rs1044507 | GGGGGCGGGGCCTATTCT | SEQ ID NO: 1168 | GGGGGCGGGGCCTATTCG | SEQ ID NO: 3534 | GAGTAGGAGCAGGAGGAGG | SEQ ID NO: 5900 |
| rs3094204 | CACCTCCTGGGTAGCTGGGACTAT | SEQ ID NO: 1169 | CACCTCCTGGGTAGCTGGGACTAC | SEQ ID NO: 3535 | CCCTTTGTGATCATTCAAAG | SEQ ID NO: 5901 |
| rs1611613 | CCGACGGGCGCTTCCTCT | SEQ ID NO: 1170 | CCGACGGGCGCTTCCTCC | SEQ ID NO: 3536 | GGTATGAACAGCACGCCTAC | SEQ ID NO: 5902 |
| rs1736927 | GTGAGTAACTCCGGCCCAGGGA | SEQ ID NO: 1171 | GTGAGTAACTCCGGCCCAGGGC | SEQ ID NO: 3537 | CAGATCACGACCCCCAC | SEQ ID NO: 5903 |
| rs2855438 | ACAAGGGCAGAGGGGAGCTGA | SEQ ID NO: 1172 | ACAAGGGCAGAGGGGAGCTGT | SEQ ID NO: 3538 | GGAGGACCAGAGGCTGCT | SEQ ID NO: 5904 |
| rs3819284 | ACACAGGGTCCCAGGCTGCA | SEQ ID NO: 1173 | ACACAGGGTCCCAGGCTGCG | SEQ ID NO: 3539 | TAGCCCCTGTGTGGATG | SEQ ID NO: 5905 |
| rs6913471 | GAGTGAAACTCTATCTTCAAAAAAAATTA | SEQ ID NO: 1174 | GAGTGAAACTCTATCTTCAAAAAAAATTT | SEQ ID NO: 3540 | AAAAAAGAGTTACAAAGATTAATGA | SEQ ID NO: 5906 |
| rs969892 | CAAGGAATTTAGAAAATCATGCATATGTTA | SEQ ID NO: 1175 | CAAGGAATTTAGAAAATCATGCATATGTTG | SEQ ID NO: 3541 | TTTTTTAAATGTAATTTGAAAATCTT | SEQ ID NO: 5907 |
| rs2516507 | TGTTGGTATTTTAATAAAAATTATTTGGCAT | SEQ ID NO: 1176 | TGTTGGTATTTTAATAAAAATTATTGGCAC | SEQ ID NO: 3542 | TAATATTTATACATACTTTGGGGTACA | SEQ ID NO: 5908 |
| rs2071552 | AGACCGCAGCTCCGGGGA | SEQ ID NO: 1177 | AGACCGCAGCTCCGGGGG | SEQ ID NO: 3543 | TTCTGCTTCAGCGCTGAG | SEQ ID NO: 5909 |
| rs375256 | CGCTTTGACCCGCAGGGT | SEQ ID NO: 1178 | CGCTTTGACCCGCAGGGC | SEQ ID NO: 3544 | AATCAAAGCCCATCTGGAC | SEQ ID NO: 5910 |
| rs2074465 | CGTTACCATCTTCCGGATCCCA | SEQ ID NO: 1179 | CGTTACCATCTTCCGGATCCCG | SEQ ID NO: 3545 | CCTTCTCCACCTGCTCCT | SEQ ID NO: 5911 |
| rs3130712 | TTCAGAGTATTAAGAGACAGAGTTAAGCCA | SEQ ID NO: 1180 | TTCAGAGTATTAAGAGACAGAGTTAAGCCG | SEQ ID NO: 3546 | TGTTTTACTCTTTAGAAAACGCA | SEQ ID NO: 5912 |
| rs2286654 | GGGCCCCCACCCATGCCT | SEQ ID NO: 1181 | GGGCCCCCACCCATGCCC | SEQ ID NO: 3547 | CTCCCAAGGATCTTTAGAGATTA | SEQ ID NO: 5913 |
| rs1265089 | GCAGGCAGCGGCTGTGGT | SEQ ID NO: 1182 | GCAGGCAGCGGCTGTGGC | SEQ ID NO: 3548 | CATCAGCGTACTTGGACTG | SEQ ID NO: 5914 |
| rs915652 | CTGTGGGCAGGCCTGACCT | SEQ ID NO: 1183 | CTGTGGGCAGGCCTGACCC | SEQ ID NO: 3549 | GTGTGGGGTTGAAATCCAG | SEQ ID NO: 5915 |
| rs362513 | TGTGCAGTTCTTGAAATTTAAGTACTCACT | SEQ ID NO: 1184 | TGTGCAGTTCTTGAAATTTAAGTACTCACC | SEQ ID NO: 3550 | AATATTACTTTTCCTTTTTTTGTTATT | SEQ ID NO: 5916 |
| rs3736710 | GAATAGACTAAGACAATAAGCAATTTTGCT | SEQ ID NO: 1185 | GAATAGACTAAGACAATAAGCAATTTTGCC | SEQ ID NO: 3551 | CTGCTTGTTAGTCTTATGAGAAGA | SEQ ID NO: 5917 |
| rs3130662 | GGTATGTTTTCCTTTTTTTCCAGGATTT | SEQ ID NO: 1186 | GGTATGTTTTCCTTTTTTTCCAGGATTG | SEQ ID NO: 3552 | TATTTTATTGTGTATTGTTGTTGTTG | SEQ ID NO: 5918 |
| rs2524056 | TCATTAGCCTTTGTGTCATAAAATAAAATA | SEQ ID NO: 1187 | TCATTAGCCTTTGTGTGATAAAATAAAATC | SEQ ID NO: 3553 | TGTGTAAAATTTGTGTCCTTTTAT | SEQ ID NO: 5919 |
| rs2395039 | ACTGCAGCCTGGAACTCCCT | SEQ ID NO: 1188 | ACTGCAGCCTGGAACTCCCC | SEQ ID NO: 3554 | CTCCAATTCCCAAAGAGCT | SEQ ID NO: 5920 |
| rs683208 | AGGGGGCCGGCCATGGAA | SEQ ID NO: 1189 | AGGGGGCCGGCCATGGAG | SEQ ID NO: 3555 | CTGAGAAAATACTAGGCCTTAGG | SEQ ID NO: 5921 |
| rs1264320 | AGGAGGGTCCCACCCTAGCCA | SEQ ID NO: 1190 | AGGAGGGTCCCACCCTAGCCG | SEQ ID NO: 3556 | AGAAGGGTGCAGAGGGTC | SEQ ID NO: 5922 |
| rs2074492 | CTCGGCCTCTGGGGAGAATGT | SEQ ID NO: 1191 | CTCGGCCTCTGGGGAGAATGC | SEQ ID NO: 3557 | AGTCCGGGTGGGTGACT | SEQ ID NO: 5923 |
| rs4524656 | AAATTTTTTTGTCAGCTAAAAATGTAGC | SEQ ID NO: 1192 | AAATTTTTTTGTCAGCTAAAAATGTAGG | SEQ ID NO: 3558 | TCATTATTGACATTACTATACATAGGG | SEQ ID NO: 5924 |
| rs3130934 | TATGTGACCCTGGGCAAGCTTTTT | SEQ ID NO: 1193 | TATGTGACCCTGGGCAAGCTTTTG | SEQ ID NO: 3559 | TTTGTTTGTTTGAGATGGAGT | SEQ ID NO: 5925 |
| rs1264457 | GCGAGCTGGGGCCCGACA | SEQ ID NO: 1194 | GCGAGCTGGGGCCCGACG | SEQ ID NO: 3560 | GTATGAACAGTTCGCCTACGA | SEQ ID NO: 5926 |
| rs2242667 | GCTTTGGCCATGCCGGTT | SEQ ID NO: 1195 | GCTTTGGCCATGCCGGTG | SEQ ID NO: 3561 | CCTGCTCTCTGTCGGCTC | SEQ ID NO: 5927 |
| rs7739536 | CAACTCTATGTTTCTTTGATTCTAACACAA | SEQ ID NO: 1196 | CAACTCTATGTTTCTTTGATTCTAACACAC | SEQ ID NO: 3562 | TAATTAAGTGACATGATTTTTACTAA | SEQ ID NO: 5928 |
| rs409715 | GCCGTGGTGATGCACACCT | SEQ ID NO: 1197 | GCCGTGGTGATGCACACCC | SEQ ID NO: 3563 | TTGCCCCAGCTACTTGG | SEQ ID NO: 5929 |
| rs3828914 | GTGGCCCCGCCCTCTCCAT | SEQ ID NO: 1198 | GTGGCCCCGCCCTCTCCAC | SEQ ID NO: 3564 | GCCTCAGTTTTCACTGGATAA | SEQ ID NO: 5930 |
| rs2272991 | TGGGAGCATGCAAGAACAAAGA | SEQ ID NO: 1199 | TGGGAGCATGCAAGAACAAAGG | SEQ ID NO: 3565 | AACACAGCAATCCAGGCAG | SEQ ID NO: 5931 |
| rs1362061 | TTGTTTTTGTTTCTGTAAAAGCACTTATC | SEQ ID NO: 1200 | TTGTTTTTGTTTCTGTAAAAGCACTTATG | SEQ ID NO: 3566 | TCTTGTTAACATATTTTAAAGTGCA | SEQ ID NO: 5932 |
| rs3132377 | AAACCTTACAACATATACTCCTTTCCATAT | SEQ ID NO: 1201 | AAACCTTACAACATATACTCCTTTCCATAC | SEQ ID NO: 3567 | TTCTAGTTTCTTTAACCAACCCT | SEQ ID NO: 5933 |
| rs743771 | CTCTACCACCCCTGGCCT | SEQ ID NO: 1202 | CTCTACCACCCCTGGCCC | SEQ ID NO: 3568 | TCCAGTTCTGTTGCAGTATTTAT | SEQ ID NO: 5934 |
| rs2523612 | GGGGAGGGGGTTGCTGTA | SEQ ID NO: 1203 | GGGGAGGGGGTTGCTGTC | SEQ ID NO: 3569 | AAAGAGGGATGGGGAGG | SEQ ID NO: 5935 |
| rs4713220 | TGACAGACTGTAATGCATGTAATATGATGT | SEQ ID NO: 1204 | TGACAGACTGTAATGCATGTAATATGATGA | SEQ ID NO: 3570 | ATACAGGTGAAATACAAAAAAT | SEQ ID NO: 5936 |
| rs2301224 | AGTTTCTGTCTTAGTATGAACATGAAAA | SEQ ID NO: 1205 | AGTTTGTGTCTTAGTTTATGAACATGAAAC | SEQ ID NO: 3571 | GTAGAATGTATAGCTTTGTTGATAA | SEQ ID NO: 5937 |
| rs3106191 | CGGCGCTGCGGCAATCCT | SEQ ID NO: 1206 | CGGCGCTGCGGCAATCCG | SEQ ID NO: 3572 | AAAGCAAAGGCTCTTGCACT | SEQ ID NO: 5938 |
| rs3749982 | GAGGCGCGAACACGGAGGA | SEQ ID NO: 1207 | GAGGCGCGAACACGGAGGT | SEQ ID NO: 3573 | CCCCTCAGGCATACTGC | SEQ ID NO: 5939 |
| rs1610678 | AGCTCGAATTGAGAAACTAGTTTTTTCA | SEQ ID NO: 1208 | AGCTCGAATTGAGAAACTAGTTTTTTCG | SEQ ID NO: 3574 | GCATTCTATAATACACTTAACATCTTT | SEQ ID NO: 5940 |
| rs2524055 | TTTGTATTAAAGGACACAAATTTTAGACAT | SEQ ID NO: 1209 | TTTGTATTAAAGGACACTTAATTTTAGACAG | SEQ ID NO: 3575 | TTTTATTTTATGACACAAAGGCT | SEQ ID NO: 5941 |
| rs2073721 | CAGAAGGCGTGGTCCCCAT | SEQ ID NO: 1210 | CAGAAGGCGTGGTCCCCAC | SEQ ID NO: 3576 | GAACAGGCAGGCTCTTTG | SEQ ID NO: 5942 |
| rs3132496 | GATTATGAATTATCAGGGATTTCTAAGAAA | SEQ ID NO: 1211 | GATTATGAATTATCAGGGATTTCTAAGAAC | SEQ ID NO: 3577 | TGACAAGTGTAGATGATAAAGGG | SEQ ID NO: 5943 |
| rs2071653 | CAGGCACTATTCTAACTACTTTACAAAAAT | SEQ ID NO: 1212 | CAGGCACTATTCTAACTACTTTACAAAAAC | SEQ ID NO: 3578 | TTATCTTATTCTGTTTAACTCCTTATG | SEQ ID NO: 5944 |
| rs7772982 | CATTTTAAATTCACAAAATATTTCTTCACA | SEQ ID NO: 1213 | CATTTTAAAACACAAAATATTTCTTCACG | SEQ ID NO: 3579 | AATATTACACCATTTAAGATGTATTGC | SEQ ID NO: 5945 |
| rs2524094 | GGGGAGGCGCCGCGTTGA | SEQ ID NO: 1214 | GGGGAGGCGCCGCGTTGG | SEQ ID NO: 3580 | GATTCTCCACTCCCCTGAGT | SEQ ID NO: 5946 |
| rs2252863 | GGCCTGTTACCCCCAGGCA | SEQ ID NO: 1215 | GGCCTGTTACCCCCAGGCG | SEQ ID NO: 3581 | CCAGGCTCCACTCAGTGAC | SEQ ID NO: 5947 |
| rs2532939 | GGGCTGGTGGGGAAAAGAGG | SEQ ID NO: 1216 | GGGCTGGTGGGGAAAAGAGC | SEQ ID NO: 3582 | GAGCCTGAAGGGCCAAC | SEQ ID NO: 5948 |
| rs3129793 | TGAGATATCTGCTGTACAAGGGATCAT | SEQ ID NO: 1217 | TGAGATATCTGCTGTACAAGGGATCAC | SEQ ID NO: 3583 | AATGAGAATTAATAATATAGAACATAA | SEQ ID NO: 5949 |
| rs3130926 | CCTGTCTTGAATCTTATTTTTTTCATTTAT | SEQ ID NO: 1218 | CCTGTCTTGAATCTTATTTTTTTCATTTAC | SEQ ID NO: 3584 | TTTTTTAAGAGAGGAGTCTTGCT | SEQ ID NO: 5950 |
| rs707918 | TGGACACTTGAGAAGTTATACAATTAGCCT | SEQ ID NO: 1219 | TGGACACTTGAGAAGTTATACAATTAGCCA | SEQ ID NO: 3585 | TATTAATTATTAGGAATAATCCATTCA | SEQ ID NO: 5951 |
| rs6925178 | GCGGGTCTTTGGGGCCAT | SEQ ID NO: 1220 | GCGGGTCTTTGGGGCCAG | SEQ ID NO: 3586 | TTTGAGGAGGGAGTCGG | SEQ ID NO: 5952 |
| rs6456902 | AACAGAAAATTTACTATTGGTGGACAAA | SEQ ID NO: 1221 | AACAGAAAAAAACTATTGGTGGTTCAAG | SEQ ID NO: 3587 | TTATAACATGAAATTATTGAATTTCA | SEQ ID NO: 5953 |
| rs1610682 | TGTGCTTTCTCAGATAATAAAAGAAATAAT | SEQ ID NO: 1222 | TGTGCTTTCTCAGATAATTAAAGAAATAAC | SEQ ID NO: 3588 | AACACTTACTGAGAAGACCACAA | SEQ ID NO: 5954 |
| rs2073720 | CCAGCTGCTGGGCCACCT | SEQ ID NO: 1223 | CCAGCTGCTGGGCCACCC | SEQ ID NO: 3589 | CTGCCTCCCCTAAAAGGAG | SEQ ID NO: 5955 |
| rs2071785 | TTCCTTTTGTTGTCTTACTCATTTTGGA | SEQ ID NO: 1224 | TTCCTTTGTTGTCTTACTCATTTTGGG | SEQ ID NO: 3590 | CAAGAAGAAGTAAAATGGC | SEQ ID NO: 5956 |
| rs2856993 | GGTGTCTTTTGCATATTGCAAATAATAC | SEQ ID NO: 1225 | GGTGTCTTTTGCATATTGCAAATAATAG | SEQ ID NO: 3591 | GTTTTTATCTTAATCTAATTTAAAAAT | SEQ ID NO: 5957 |
| rs4959012 | CTGGCCCAGCCACTGCTGA | SEQ ID NO: 1226 | CTGGCCCAGCCACTGCTGG | SEQ ID NO: 3592 | CTGTTCCCTGGTTTGGTG | SEQ ID NO: 5958 |
| rs614549 | TTGAGATACTCCTTACTGTACTTAAATTGA | SEQ ID NO: 1227 | TTGAGATACTCCTTACTGTACTTAAATTGG | SEQ ID NO: 3593 | AACTGGATATCTCATCTTATGCTA | SEQ ID NO: 5959 |
| rs3749963 | GGGGGCTCGGGGGTTGCA | SEQ ID NO: 1228 | GGGGGCTCGGGGGTTGCG | SEQ ID NO: 3594 | AGGTTCTGAAGGCTTCTCCT | SEQ ID NO: 5960 |
| rs3757324 | TTTTTCATTTTATAATATTCCATGATGCT | SEQ ID NO: 1229 | TTTTTCATTTTATTATATTCCATGATGCG | SEQ ID NO: 3595 | TTAAATTTTTATACAATCATATTTCA | SEQ ID NO: 5961 |
| rs6457150 | CCAGGCTCCCCCATCCAG | SEQ ID NO: 1230 | CCAGGCTCCCCCATCCAC | SEQ ID NO: 3596 | GCCGCCGATTACATAAAC | SEQ ID NO: 5962 |
| rs915651 | CCATGCCCCAGCCACGCA | SEQ ID NO: 1231 | CCATGCCCCAGCCACGCG | SEQ ID NO: 3597 | ACAGGACGGTAGGAGAGGAG | SEQ ID NO: 5963 |
| rs3130456 | GTTCCCGATTGGCCAGCTCATT | SEQ ID NO: 1232 | GTTCCCGATTGGCCAGCTCATG | SEQ ID NO: 3598 | GTTCTCTTCCGCGCCATT | SEQ ID NO: 5964 |
| rs1150739 | CACAAAATCCGCAGATATCAGAATTATA | SEQ ID NO: 1233 | CACAAAATCCGCAGATATCAGAATTATG | SEQ ID NO: 3599 | GACATAGAATATAATAACCATATTTAA | SEQ ID NO: 5965 |
| rs1611617 | ACAGGGCGCCTCCCGGATC | SEQ ID NO: 1234 | ACAGGGCGCCTCCCGGATG | SEQ ID NO: 3600 | CCTGTAGATCTCCGGGG | SEQ ID NO: 5966 |
| rs3094139 | TGTATAAATAGTCCATTCCTTTTTATTGCT | SEQ ID NO: 1235 | TGTATAAATAGTCCATTCCTTTTTATTGCC | SEQ ID NO: 3601 | TGTATGGATGTACTACAATGTGTC | SEQ ID NO: 5967 |
| rs2394414 | AAAAACAAACAAGGGGAGGGGTA | SEQ ID NO: 1236 | AAAAACAAACAAGGGGAGGGGTG | SEQ ID NO: 3602 | AAGAAGAAGAAAAACAAAAACA | SEQ ID NO: 5968 |
| rs11724 | CAGGAGGACGCATTCGGCG | SEQ ID NO: 1237 | CAGGAGGACGCATTCGGCC | SEQ ID NO: 3603 | AACCCAGAGCCAGCGAT | SEQ ID NO: 5969 |
| rs1611185 | AGCTCTGCATGTTCCTCCTCCTA | SEQ ID NO: 1238 | AGCTCTGCATGTTCCTCCTCCAG | SEQ ID NO: 3604 | ACATCTGAGCCGCCTT | SEQ ID NO: 5970 |
| rs6940440 | TTAAACACAAGGATTTTTCTTTATTTTTT | SEQ ID NO: 1239 | TTAAACACAAGGATTTTTCTTTATTTTTG | SEQ ID NO: 3605 | TTTTTCATAGTTCATTTAAACATAAA | SEQ ID NO: 5971 |
| rs7452208 | GAAGGCCTTTGTTACTTACTTAGCTCCA | SEQ ID NO: 1240 | GAAGGCCTTTGTTACTTACTTAGCTCCG | SEQ ID NO: 3606 | CAGGAATAGCCCTTGGGTT | SEQ ID NO: 5972 |
| rs3763342 | CATGTGGATTTTGTCATTCTAATTTATTAT | SEQ ID NO: 1241 | CATGTGGATTTTGTCATTCTAAAAATTAC | SEQ ID NO: 3607 | GTTTTCTTTTATCTTTGGACTG | SEQ ID NO: 5973 |
| rs2518030 | GCTCCTTCCCGCAGAGGCT | SEQ ID NO: 1242 | GCTCCTTCCCGCAGAGGCC | SEQ ID NO: 3608 | ACTCACCTGCCCAGGTCT | SEQ ID NO: 5974 |
| rs7772174 | ACGATGACTTCCAGCTTCATCCAA | SEQ ID NO: 1243 | ACGATGACTTCCAGCTTCATCCAT | SEQ ID NO: 3609 | ACATGAACTCATTCCTTTTTATG | SEQ ID NO: 5975 |
| rs3869097 | CGCCACCCATTCTGGCTGT | SEQ ID NO: 1244 | CGCCACCCATTCTGGCTGC | SEQ ID NO: 3610 | CTTGAGGGGCCCTTCAG | SEQ ID NO: 5976 |
| rs2272593 | CCTGAGGGGCTTGGGGAA | SEQ ID NO: 1245 | CCTGAGGGGCTTGGGGAG | SEQ ID NO: 3611 | CTTGTGCCTTGGATGACC | SEQ ID NO: 5977 |
| rs3129792 | AGCCAGGCGTCACCTTCCACA | SEQ ID NO: 1246 | AGCCAGGCGTCACCTTCCACG | SEQ ID NO: 3612 | CGAACCTGCGAACCACAG | SEQ ID NO: 5978 |
| rs1264305 | CGCCCAAGAGCCAGCAAA | SEQ ID NO: 1247 | CGCCCAAGAGCCAGCAAG | SEQ ID NO: 3613 | GATCTCCACCTGCACAGG | SEQ ID NO: 5979 |
| rs4959047 | CCAAGAAGAGAAGGAAGGAATATATATTA | SEQ ID NO: 1248 | CCAAGAAGAGAAGGAAGGAATATATATTG | SEQ ID NO: 3614 | AACAAAAATAAACAGACCAAGAC | SEQ ID NO: 5980 |
| rs4713436 | CACTCTGTGTCAGGGGGTCAGAGA | SEQ ID NO: 1249 | CACTCTGTGTCAGGGGGTCAGAGG | SEQ ID NO: 3615 | GACCAGCACGGTTCTGGT | SEQ ID NO: 5981 |
| rs7829 | ACGCTGACCTGTGCTCCCTCT | SEQ ID NO: 1250 | ACGCTGACCTGTGCTCCCTCC | SEQ ID NO: 3616 | CAGAGAGGTGGGGCTGAG | SEQ ID NO: 5982 |
| rs3094696 | TCTTGGAGATGGGGAGTTTT | SEQ ID NO: 1251 | TCTTGGAGATGGGGAGAAG | SEQ ID NO: 3617 | AAGGAAGATAAATATTTAGCAAAAA | SEQ ID NO: 5983 |
| rs3828881 | AGCCTGAGGCCACAGTCCCAA | SEQ ID NO: 1252 | AGCCTGAGGCCACAGTCCCAT | SEQ ID NO: 3618 | CTGCCAGCCTGGAAGAACT | SEQ ID NO: 5984 |
| rs3094000 | GGGTGCTGGGGCAGAGAGA | SEQ ID NO: 1253 | GGGTGCTGGGGCAGAGAGG | SEQ ID NO: 3619 | GCAGGATCTGGATGGGAC | SEQ ID NO: 5985 |
| rs2855440 | ACTCCGCAGGCCCTCCAGTCT | SEQ ID NO: 1254 | ACTCCGCAGGCCCTCCAGTCC | SEQ ID NO: 3620 | AGGCTGCTGGCAGAGTCT | SEQ ID NO: 5986 |
| rs6457697 | AAATAGAGAATATAGGGAAAACACCTAGAA | SEQ ID NO: 1255 | AAATAGAGAATATAGGGAAAACACCTAGAC | SEQ ID NO: 3621 | ATAATAGTCAAAGTAAAAGCCACA | SEQ ID NO: 5987 |
| rs6919044 | GAATCCAAAATAAGTTTTTGTTTAAGAAA | SEQ ID NO: 1256 | GAATCCAAAATAAGTTTTTGAAAAGAAG | SEQ ID NO: 3622 | GAGAGAAAATTAATAATTGTTATGAA | SEQ ID NO: 5988 |
| rs1013518 | TGTATATTATCTGTGTTTACGTGGTAGAGA | SEQ ID NO: 1257 | TGTATATTATCTGTGTTTACGTGGTAGAGG | SEQ ID NO: 3623 | TTTATTACTTTATGGGTCACTGG | SEQ ID NO: 5989 |
| rs2144426 | AACTTACCAAAATTGACAGTAGAAGAAA | SEQ ID NO: 1258 | AACTTACCAAAATTGACAGTAGAAGAAG | SEQ ID NO: 3624 | ACAAAACAATAGTTTGATATAAT | SEQ ID NO: 5990 |
| rs4267952 | AACTTACCAAAATTGACAGTAGAAGAAA | SEQ ID NO: 1259 | AACTTACCAAAATTGACAGTAGAAGAAG | SEQ ID NO: 3625 | ACAATTTCAATAGTTTGATATTTAT | SEQ ID NO: 5991 |
| rs4947339 | AGATTCGAGGTTAAAACACAACTATACTA | SEQ ID NO: 1260 | AGATTCGAGGTTATTTACACAACTATACTG | SEQ ID NO: 3626 | AAGATAAAGTGAAAAATGTTAATTT | SEQ ID NO: 5992 |
| rs4618569 | CCCATGTTTGTATATATACCTGTGTGTAT | SEQ ID NO: 1261 | CCCATGTTTGTATATATACCTGTGTGTAC | SEQ ID NO: 3627 | TCTAGAAGGAGAGAATATATAATAGAA | SEQ ID NO: 5993 |
| rs7767288 | GGACACATATTTATCAGCCAACTATAAATA | SEQ ID NO: 1262 | GGACACATAAAATCAGCCAACTATAAATG | SEQ ID NO: 3628 | GCCATAGGATAGTGAAAGCAA | SEQ ID NO: 5994 |
| rs3752528 | TGGGCCCAGCCCCAGCAA | SEQ ID NO: 1263 | TGGGCCCAGCCCCAGCAG | SEQ ID NO: 3629 | GAGCCTGTAAAGATGGGAAC | SEQ ID NO: 5995 |
| rs3956986 | GGGCGCCCAGCCCAACCC | SEQ ID NO: 1264 | GGGCGCCCAGCCCAACCG | SEQ ID NO: 3630 | GCCCTGGGTTCTGTAAGC | SEQ ID NO: 5996 |
| rs2285320 | CTCACTGCTGGGCCGGTCAC | SEQ ID NO: 1265 | CTCACTGCTGGGCCGGTCAG | SEQ ID NO: 3631 | AGCCTCAGCTTCGCAAGT | SEQ ID NO: 5997 |
| rs6938690 | AATTAGCTAATCAGGTTTAGTTTTTTTCTA | SEQ ID NO: 1266 | AATTAGCTAATCAGGTTTAGTTTTTTTCTG | SEQ ID NO: 3632 | ATAGAAGTTTCATGTTCCTTGAAT | SEQ ID NO: 5998 |
| rs2532932 | CCAAGGTGTTGGGATTACAAGCATAAA | SEQ ID NO: 1267 | CCAAGGTGTTGGGATTACAAGCATAAG | SEQ ID NO: 3633 | ATTTTGGAGATGAAGACGTGT | SEQ ID NO: 5999 |
| rs1634725 | ACATATATGAAGAAAACTATGGACATTTTA | SEQ ID NO: 1268 | ACATATATGAAGAAAACTATGGACATTTTT | SEQ ID NO: 3634 | AAATGAGGCTATTATTAAATATCTAGAA | SEQ ID NO: 6000 |
| rs3117097 | AATCTCTGGAGTTTAACAAATGATTTT | SEQ ID NO: 1269 | AATCTCTGGAGTTTAACAAATGATTTC | SEQ ID NO: 3635 | ACATTTACATTGATCTATCTTTATATT | SEQ ID NO: 6001 |
| rs2621421 | CCTGAAGGAAGTGGTCACTAGACCAG | SEQ ID NO: 1270 | CCTGAAGGAAGTGGTCACTAGACCAC | SEQ ID NO: 3636 | ATGTAACCAAATACAGGATT | SEQ ID NO: 6002 |
| rs2076541 | AGTTAGTAAGAAAAATAAGATGAGGATGAA | SEQ ID NO: 1271 | AGTTAGTAAGAAAAATAAGATGAGGATGAG | SEQ ID NO: 3637 | ATAATATAGAATGAGGGATAAATGA | SEQ ID NO: 6003 |
| rs3094613 | GGCAAAAAAGTGAGACTCTGTTTCAAAT | SEQ ID NO: 1272 | GGCAAAAAAGTGAGACTCTGTTTCAAAA | SEQ ID NO: 3638 | ATAAAATAAAAAGGCCGGG | SEQ ID NO: 6004 |
| rs4711186 | CAGGTGAAATACAAAAAATTCATGAAAATT | SEQ ID NO: 1273 | CAGGTGAAATACAAAAAATTCATGAAAATG | SEQ ID NO: 3639 | CCTTTGGTACCAAACTCATACTA | SEQ ID NO: 6005 |
| rs3130165 | AGAAGCAATCGCACACCG | SEQ ID NO: 1274 | AGAAGCAATCGCACACCC | SEQ ID NO: 3640 | TGTCAGAAACTGGAGCCATAG | SEQ ID NO: 6006 |
| rs2395312 | GACCTTTATATCTTTCTAGAAACGTATCCT | SEQ ID NO: 1275 | GACCTTTATATCTTTCTAGAAACGTATCCG | SEQ ID NO: 3641 | CAAATTTATATGTATAGAGTTGGTCG | SEQ ID NO: 6007 |
| rs1627764 | AGGACCCGGGGAGCCGCT | SEQ ID NO: 1276 | AGGACCCGGGGAGCCGCG | SEQ ID NO: 3642 | AAGGAGGAGGGTCGGAC | SEQ ID NO: 6008 |
| rs204896 | GCGCTGCGTGGATGGCCA | SEQ ID NO: 1277 | GCGCTGCGTGGATGGCCG | SEQ ID NO: 3643 | CTTCACCGGTGAGGACTGT | SEQ ID NO: 6009 |
| rs7750714 | ACCGCCTTCGGGGCCTGA | SEQ ID NO: 1278 | ACCGCCTTCGGGGCCTGG | SEQ ID NO: 3644 | ACCCTGAGAGCCATGCCT | SEQ ID NO: 6010 |
| rs1054684 | TGGGTTATGTAAAGTGACAAATATTAAT | SEQ ID NO: 1279 | TGGGTTATGTAAAGTGACATTTATATTAAC | SEQ ID NO: 3645 | CAATAACAAACCCATTACATGA | SEQ ID NO: 6011 |
| rs7768931 | CCGAAGGCGGTGCATGGA | SEQ ID NO: 1280 | CCGAAGGCGGTGCATGGG | SEQ ID NO: 3646 | ATTGGGGATTCCCCATCT | SEQ ID NO: 6012 |
| rs2213573 | CAAATACTTGACTCAGTATTTTGAAGCTAA | SEQ ID NO: 1281 | CAAATACTTGACTCAGTATTTTGAAGCTAG | SEQ ID NO: 3647 | CTGGGTAAAGTATCTGATTGACA | SEQ ID NO: 6013 |
| rs241410 | TGGTAGGTAGAAATGAGGGACGTCATG | SEQ ID NO: 1282 | TGGTAGGTAGAAATGAGGGACGTCATC | SEQ ID NO: 3648 | ATCCCTGAATGGAATAAC | SEQ ID NO: 6014 |
| rs2523734 | ATGGATCACATATTGAAATGATAATAT | SEQ ID NO: 1283 | ATGGATCACATATTGAAATGATAATAG | SEQ ID NO: 3649 | TTGGAAATATAGGACTAAATAAAAAT | SEQ ID NO: 6015 |
| rs2163472 | TCTGCAGATAGTTTGAAAAAATATACATT | SEQ ID NO: 1284 | TCTGCAGATAGTTTGAAATTTATACATC | SEQ ID NO: 3650 | TATAACTGGTCTCA11ACACTCTGG | SEQ ID NO: 6016 |
| rs6930003 | CCCACCGAGCCCCGCCCT | SEQ ID NO: 1285 | CCCACCGAGCCCCGCCCC | SEQ ID NO: 3651 | GATTTTGGCTGAAAATGAAAC | SEQ ID NO: 6017 |
| rs4713193 | AACAAAACAAACAAACAAACAAACAAAA | SEQ ID NO: 1286 | AACAAAACAAACAAACAAACAAACAAAC | SEQ ID NO: 3652 | AAACATAGCATCACTTTTACCAG | SEQ ID NO: 6018 |
| rs1264321 | CTACTTACCAGCCCCCCTACACAT | SEQ ID NO: 1287 | CTACTTACCAGCCCCCCTACACAC | SEQ ID NO: 3653 | CACACTGACACACACACACA | SEQ ID NO: 6019 |
| rs204478 | AAATAACTTTTACTATAAGGGGAAAGATTT | SEQ ID NO: 1288 | AAATAACTTTTACTATAAGGGGAAAGATTA | SEQ ID NO: 3654 | AGATAGTTTTCCAGAACATGGTT | SEQ ID NO: 6020 |
| rs2301752 | CGCCGCCTGCTCATCTCCA | SEQ ID NO: 1289 | CGCCGCCTGCTCATCTCCG | SEQ ID NO: 3655 | GTACAACTGGCCCCACC | SEQ ID NO: 6021 |
| rs6901830 | CTTCCATTTTTGTCCCCTGGACA | SEQ ID NO: 1290 | CTTCCATTTTTGTCCCCTGGACG | SEQ ID NO: 3656 | ATGCTGTAGGTGTCAGC | SEQ ID NO: 6022 |
| rs3998159 | GACATGTAGGCATTATCTAATGGTCAAAT | SEQ ID NO: 1291 | GACATGTAGGCATTATCTAATGGTCAAAG | SEQ ID NO: 3657 | TACTTACAATTGTACATAAAAATAA | SEQ ID NO: 6023 |
| rs2246986 | AGGGAACAAATAATAAAGAAACAAGATA | SEQ ID NO: 1292 | AGGGAACAAATAATAAAGAAACAAGATG | SEQ ID NO: 3658 | AATTAGATGTAAAATAGATGAGAAAAA | SEQ ID NO: 6024 |
| rs3117113 | AGATCCTTAATAAGTACCTCAAAATGAAT | SEQ ID NO: 1293 | AGATCCTTAATAAGTACCTCTTAAATGAAG | SEQ ID NO: 3659 | TCCCTAATTTACAGAAGAGAAACT | SEQ ID NO: 6025 |
| rs2857128 | GACTACATCAGTAGCTTATAATTCTTTTGA | SEQ ID NO: 1294 | GACTACATCAGTAGCTTATAATTCTTTTGG | SEQ ID NO: 3660 | ATCAGGATCCCTTTTTATTC | SEQ ID NO: 6026 |
| rs2516643 | TGCCATGTTGCCTGAGATT | SEQ ID NO: 1295 | TGCCATGTTGCCTGAGATC | SEQ ID NO: 3661 | CTTGGCCTCAAAGTGCTG | SEQ ID NO: 6027 |
| rs3117103 | TTAAATGATTGAAGTATAATTTACAGACAA | SEQ ID NO: 1296 | TTAAATGATTGAAGTATAATTTACAGACAT | SEQ ID NO: 3662 | TATTTTTACAAGCACAGATTATAAGT | SEQ ID NO: 6028 |
| rs2233965 | GGTAAAAGTCACTGCAGCA | SEQ ID NO: 1297 | GGTAATTTGTCACTGCAGCC | SEQ ID NO: 3663 | CAGGAATTAGTCAGTATCTCATAAG | SEQ ID NO: 6029 |
| rs6916394 | ATGCCACACATAATTTATCGT | SEQ ID NO: 1298 | ATGCCACACATAATTTATCGC | SEQ ID NO: 3664 | TTAAAGTGTACAGATCAGTGGCT | SEQ ID NO: 6030 |
| rs2074485 | CCAGGGCCCCCAAGAGCA | SEQ ID NO: 1299 | CCAGGGCCCCCAAGAGCG | SEQ ID NO: 3665 | CAGGAGGAGGGTTCGG | SEQ ID NO: 6031 |
| rs1619893 | GTGAGACTCCATCTCAAAAAAAAAAAA | SEQ ID NO: 1300 | GTGAGACTCCATCTCAAAAAAAAAAAG | SEQ ID NO: 3666 | AAAAGAAATAGTCAGTTGAAACATT | SEQ ID NO: 6032 |
| rs4449615 | TCTGAATIATTTCAGATTACATACATAAAA | SEQ ID NO: 1301 | TCTGAATTATTTCAGATTACATACATTAAG | SEQ ID NO: 3667 | ATGACTTCATTAATAGGTAATATCACA | SEQ ID NO: 6033 |
| rs3115611 | TGGTCCCTCCCCCAATAGGTAGG | SEQ ID NO: 1302 | TGGTCCCTCCCCCAATAGGTAGC | SEQ ID NO: 3668 | ATTACAATTCGCATAACAATTCA | SEQ ID NO: 6034 |
| rs2301748 | CCCATGGCCCCGACGTCA | SEQ ID NO: 1303 | CCCATGGGCCCGACGTCG | SEQ ID NO: 3669 | CACCCTCTCAGCGGCTC | SEQ ID NO: 6035 |
| rs3129845 | GGATCTGTATTAGGTGCTCCAGAGCA | SEQ ID NO: 1304 | GGATCTGTATTAGGTGCTCCAGAGCG | SEQ ID NO: 3670 | TTGTACTAACAGGATATGTATATATAG | SEQ ID NO: 6036 |
| rs3130829 | TTTAACTCTAATAGTCTCCTTTGATTATGT | SEQ ID NO: 1305 | TTTAACTCTAATAGTCTCCTTTGATTATGC | SEQ ID NO: 3671 | AACTAAATATTGTCATTAATTTAAGGA | SEQ ID NO: 6037 |
| rs6457125 | TTGTCTGGGATGTTGCTCCTCAT | SEQ ID NO: 1306 | TTGTCTGGGATGTTGCTCCTCAC | SEQ ID NO: 3672 | TGTAAGATGTAAATGTGGATATGG | SEQ ID NO: 6038 |
| rs2571402 | ATCGGGTCCAAATGCAAGACCT | SEQ ID NO: 1307 | ATCGGGTCCAAATGCAAGACCA | SEQ ID NO: 3673 | AGGGAGCTAATAATTAGAGGGAT | SEQ ID NO: 6039 |
| rs2157605 | GAAAACACCCCCACTGTGTTGAGT | SEQ ID NO: 1308 | GATAACACCCCCACTGTGTTGAGC | SEQ ID NO: 3674 | GCAACAAAGTGGATATTAAGGAC | SEQ ID NO: 6040 |
| rs2275853 | AGCCACATCTCCTGTGGGATCTC | SEQ ID NO: 1309 | AGCCACATCTCCTGTGGGATCTG | SEQ ID NO: 3675 | CCAGGTTCTGTTTTTGTTCTAC | SEQ ID NO: 6041 |
| rs3132710 | GGCTGAATTGCTGGATGATTCTGT | SEQ ID NO: 1310 | GGCTGAATTGCTGGATGATTCTGC | SEQ ID NO: 3676 | CACACTTACAATGAGGTAAGGG | SEQ ID NO: 6042 |
| rs2654005 | AGATGCAGTGAAGGCACAACCTACT | SEQ ID NO: 1311 | AGATGCAGTGAAGGCACAACCTACC | SEQ ID NO: 3677 | CTACAGGCCCTTAGGAATTATTA | SEQ ID NO: 6043 |
| rs1011985 | TGTCCACTTGTGCCTCCCACTTC | SEQ ID NO: 1312 | TGTCCACTTGTGCCTCCCACTTG | SEQ ID NO: 3678 | TGGTAGTTATTCTTTTGTATGCAC | SEQ ID NO: 6044 |
| rs2075789 | GCTTCCCCAGCCCGGCCT | SEQ ID NO: 1313 | GCTTCCCCAGCCCGGCCC | SEQ ID NO: 3679 | CGAGGAGGAGGAAGTCGAG | SEQ ID NO: 6045 |
| rs2076182 | CAGAGCGAGGCTGGTGAGTGAA | SEQ ID NO: 1314 | CAGAGCGAGGCTGGTGAGTGAC | SEQ ID NO: 3680 | CAGGTCACGACCACCC | SEQ ID NO: 6046 |
| rs3132684 | CCCCATCTCTACCAAAAAACAGAAA | SEQ ID NO: 1315 | CCCCATCTCTACCAAAAAACAGAAG | SEQ ID NO: 3681 | GTGGGCTTGCACCTGTAGT | SEQ ID NO: 6047 |
| rs238877 | TTGTAGTAGGCAAGAAAAAGAAATTAAATGA | SEQ ID NO: 1316 | TTGTAGTAGGCAAGAAAAAGAAATAAATGG | SEQ ID NO: 3682 | AATACAAATGTACTTATTTTCAGATG | SEQ ID NO: 6048 |
| rs2072681 | GGGAGGGAAAAGGGTCCTATAGAAT | SEQ ID NO: 1317 | GGGAGGGAAAAGGGTCCTATAGAAC | SEQ ID NO: 3683 | AGGGAAGACAAAAATGTTTTATT | SEQ ID NO: 6049 |
| rs6919908 | GCCTGAACCTGAATCCCCTGTCA | SEQ ID NO: 1318 | GCCTGAACCTGAATCCCCTGTCG | SEQ ID NO: 3684 | AGATGTATGGGACACATCTCTT | SEQ ID NO: 6050 |
| rs2647045 | AGAATGCTGCAGATGGTGGCA | SEQ ID NO: 1319 | AGAATGCTGCAGATGGTGGCG | SEQ ID NO: 3685 | AATGTTCAATGTGAAAAAGGATA | SEQ ID NO: 6051 |
| rs1632986 | GGACACTGCATTCATTTCTTTTGGT | SEQ ID NO: 1320 | GGACACTGCATTCATTTCTTTTGGC | SEQ ID NO: 3686 | CACTTATTTCTTTTGGAATGGA | SEQ ID NO: 6052 |
| rs2395470 | CTTCTGCCTCCCTCATCCCTCA | SEQ ID NO: 1321 | CTTCTGCCTCCCTCATCCCTCG | SEQ ID NO: 3687 | CTCTCAATTCTGTTCTCAGCAC | SEQ ID NO: 6053 |
| rs915668 | AGCCCATCACATGCTCAATACATTC | SEQ ID NO: 1322 | AGCCCATCACATGCTCAATACATTG | SEQ ID NO: 3688 | AGTCAAAGAAACCTCATAGCAC | SEQ ID NO: 6054 |
| rs2295119 | GAGTTTGTGCAGACGCACAGAA | SEQ ID NO: 1323 | GAGTTTGTGCAGACGCACAGAC | SEQ ID NO: 3689 | CTCTGGGGAGTATATGTTTGAAT | SEQ ID NO: 6055 |
| rs2071536 | GGCGCGGAGAGTCCCAGA | SEQ ID NO: 1324 | GGCGCGGAGAGTCCCAGG | SEQ ID NO: 3690 | GTCCGAGTGCCAATGGCTA | SEQ ID NO: 6056 |
| rs3130827 | TCTTGTGTCATATGGCTTCATTGCTA | SEQ ID NO: 1325 | TCTTGTGTCATATGGCTTCATTGCTG | SEQ ID NO: 3691 | GGCTGTACTCAAGATCAAGTCT | SEQ ID NO: 6057 |
| rs3093556 | GTGGTGCGAGTGCGTGAATAT | SEQ ID NO: 1326 | GTGGTGCGAGTGCGTGAATAC | SEQ ID NO: 3692 | AGGACCCCATGGCAGT | SEQ ID NO: 6058 |
| rs3734818 | CGGGAGTCACAGATACATTGTCTGGA | SEQ ID NO: 1327 | CGGGAGTCACAGATACATTGTCTGGG | SEQ ID NO: 3693 | AAGTGAAACTTAGGAGCTTTGTG | SEQ ID NO: 6059 |
| rs4713270 | AGAAGCTGTAGGGAACAGGCTTGTA | SEQ ID NO: 1328 | AGAAGCTGTAGGGAACAGGCTTGTG | SEQ ID NO: 3694 | ATAAGGCTGCTAAGCAAGTCTC | SEQ ID NO: 6060 |
| rs1988565 | GAATGCTGCAGATGGTGGCAGA | SEQ ID NO: 1329 | GAATGCTGCAGATGGTGGCAGG | SEQ ID NO: 3695 | TGCTCAATGTGAAAAAGGATAG | SEQ ID NO: 6061 |
| rs1233333 | CTCCTCCGCGCAGGGGCT | SEQ ID NO: 1330 | CTCCTCCGCGCAGGGGCC | SEQ ID NO: 3696 | TTTCCCTCCTGACCCC | SEQ ID NO: 6062 |
| rs2074489 | GGACCTGGGACTTCGTCCTGATT | SEQ ID NO: 1331 | GGACCTGGGACTTCGTCCTGATC | SEQ ID NO: 3697 | CTCTTCTCCTACACCAAGCAT | SEQ ID NO: 6063 |
| rs1736981 | GGGCTGTTCAGTGTCACAACAAACAA | SEQ ID NO: 1332 | GGGCTGTTCAGTGTCACAACTTACTG | SEQ ID NO: 3698 | GACTGACCTGGATTAGTTTATGA | SEQ ID NO: 6064 |
| rs3129005 | AAAGATGGAGACATCTCAGCCCCT | SEQ ID NO: 1333 | AAAGATGGAGACATCTCAGCCCCG | SEQ ID NO: 3699 | CTCTCTGGAACAGGTAAGATG | SEQ ID NO: 6065 |
| rs3998357 | GGTGAGGACAAGGAGCAGGAGAAA | SEQ ID NO: 1334 | GGrGAGGACAAGGAGCAGGAGAAG | SEQ ID NO: 3700 | GACTCTAAAGCAGTGGAGGAG | SEQ ID NO: 6066 |
| rs3132645 | CATAGTAGATTCCTGATGGGTTTTCTCT | SEQ ID NO: 1335 | CATAGTAGATTCCTGATGGGTTTTCTCC | SEQ ID NO: 3701 | ATGATTAAATTATATATTGTCTATGT | SEQ ID NO: 6067 |
| rs1264548 | AGAAAATATATTCTGTATGATTTCAATGTT | SEQ ID NO: 1336 | AGAAAATATATTCTGTATGATTTCAATGTC | SEQ ID NO: 3702 | CTGAAATATGGTTTCTCCTGGTA | SEQ ID NO: 6068 |
| rs2428495 | GGGAAAGGCCTGGGTAATGGA | SEQ ID NO: 1337 | GGGAAAGGCCTGGGTAATGGG | SEQ ID NO: 3703 | ATTCTTTGATTGGGATGTTTC | SEQ ID NO: 6069 |
| rs3817824 | TGGGCAGAGGGGACACAACTAA | SEQ ID NO: 1338 | TGGGCAGAGGGGACACAACTAG | SEQ ID NO: 3704 | CTCTGGAGATTCTTTGATTTGG | SEQ ID NO: 6070 |
| rs1632948 | TCACAGAAAATTATAAAATGTAAAACACTA | SEQ ID NO: 1339 | TCACAGAAAATTATAAAATGTAAAACACTG | SEQ ID NO: 3705 | TTTATGTAACTAGTGTGCGTATCA | SEQ ID NO: 6071 |
| rs1736998 | ACCCCAATAACCACCCTTGGTTA | SEQ ID NO: 1340 | ACCCCAATAACCACCCTTGGTTT | SEQ ID NO: 3706 | TCAGGTTACCCCAGAACTCA | SEQ ID NO: 6072 |
| rs2535252 | GTCCCTTGAGGGACTTCAGATG | SEQ ID NO: 1341 | GTCCCTTGAGGGACTTCAGATC | SEQ ID NO: 3707 | AAGTCCCTTAGCTGCTC | SEQ ID NO: 6073 |
| rs1625485 | CGCAGGACCCGGGGAGCA | SEQ ID NO: 1342 | CGCAGGACCCGGGGAGCC | SEQ ID NO: 3708 | CGCAAGGAGGAGGGTC | SEQ ID NO: 6074 |
| rs1811197 | CTGGTAGGAATGCAAAAAATGTGGT | SEQ ID NO: 1343 | CTGGTAGGAATGCAAAAAATGTGGC | SEQ ID NO: 3709 | GCCAATTTGTAAAGTGGTATG | SEQ ID NO: 6075 |
| rs2524173 | CTGGTCCCAGGATTGATAGCAACA | SEQ ID NO: 1344 | CTGGTCCCAGGATTGATAGCAACG | SEQ ID NO: 3710 | GCCTATAACTGGTCTCCTGGT | SEQ ID NO: 6076 |
| rs6925580 | CTGCCATAGCTGGAGAGCCCTT | SEQ ID NO: 1345 | CTGCCATAGCTGGAGAGCCCTG | SEQ ID NO: 3711 | GGACCTTGCACTTTTCCTATT | SEQ ID NO: 6077 |
| rs3828903 | CACAATCTATTGTCTGGCACCACCT | SEQ ID NO: 1346 | CACAATCTATTGTCTGGCACCACCC | SEQ ID NO: 3712 | CATTTCTCTGGTGACATTTCC | SEQ ID NO: 6078 |
| rs2596450 | GAGTGGAAAGATGGTCAGAGAATGGA | SEQ ID NO: 1347 | GAGTGGAAAGATGGTCAGAGAATGGG | SEQ ID NO: 3713 | AGTGTGAGATAGAGAGTATGGAAG | SEQ ID NO: 6079 |
| rs6457042 | TCCCCACTGTCTACTCTGATAGCCT | SEQ ID NO: 1348 | TCCCCACTGTCTACTCTGATAGCCC | SEQ ID NO: 3714 | AAGGAAACAGGGACCTTAATC | SEQ ID NO: 6080 |
| rs1799908 | GGTCCCTCTGGACCTCAGGGT | SEQ ID NO: 1349 | GGTCCCTCTGGACCTCAGGGA | SEQ ID NO: 3715 | CTCTAGGATACCCAGGACCTC | SEQ ID NO: 6081 |
| rs8365 | GGAACTTTTGCCCACCTTTGAAGATG | SEQ ID NO: 1350 | GGAACTTTGCCCACCTTTGAAGATC | SEQ ID NO: 3716 | AATCAAGAAATCAGGGAAAGC | SEQ ID NO: 6082 |
| rs3823340 | GCACTGTCACTGCCTGGGGTAGA | SEQ ID NO: 1351 | GCACTGTCACTGCCTGGGGTAGG | SEQ ID NO: 3717 | CAAAAACAGAACCTGGTCAGAT | SEQ ID NO: 6083 |
| rs1611589 | AATTGCATTTGCAAAAATGTATCATCA | SEQ ID NO: 1352 | AATTGCATTTGCTTTAAATGTATCATCG | SEQ ID NO: 3718 | CATCATTATTATTTTTGAGACA | SEQ ID NO: 6084 |
| rs2071291 | GGGTATCCGGGCGCTACGTAA | SEQ ID NO: 1353 | GGGTATCCGGGCGCTACGTAG | SEQ ID NO: 3719 | CAGCGTGCCCACAGTC | SEQ ID NO: 6085 |
| rs1233387 | AGTGGAGCTTGGGGTCCAGCA | SEQ ID NO: 1354 | AGTGGAGCTTGGGGTCCAGCG | SEQ ID NO: 3720 | AGACAGCAGGATGATGAGTGT | SEQ ID NO: 6086 |
| rs6920823 | GCTCCCCTTTGCCTAAACCCTATT | SEQ ID NO: 1355 | GCTCCCCTTTGCCTAAACCCTATG | SEQ ID NO: 3721 | CCTCCTGTGCATCTGTACTC | SEQ ID NO: 6087 |
| rs2251731 | TGAAGAAATGAGGGAAGAGATAGGAAT | SEQ ID NO: 1356 | TGAAGAAATGAGGGAAGAGATAGGAAG | SEQ ID NO: 3722 | AAAGGGGAGAGAAAAAGTAAAG | SEQ ID NO: 6088 |
| rs6920830 | CCCCACAGCTTTGATGGCAGT | SEQ ID NO: 1357 | CCCCACAGCTTTGATGGCAGC | SEQ ID NO: 3723 | CCTCATCTTCAACTTTTGTGC | SEQ ID NO: 6089 |
| rs3873375 | TCTCCCTGAATCCTCAACGCTAATA | SEQ ID NO: 1358 | TCTCCCTGAATCCTCAACGCTAATG | SEQ ID NO: 3724 | GGACTGTCTCCTTCTCACCTC | SEQ ID NO: 6090 |
| rs1737004 | CACCACATCCTGAAAGATGGCAC | SEQ ID NO: 1359 | CACCACATCCTGAAAGATGGCAG | SEQ ID NO: 3725 | CATTCCTCAGAGGGTTTCAT | SEQ ID NO: 6091 |
| rs6457611 | TTCTTTGTGTTAGCAAACTTATTTATAGAT | SEQ ID NO: 1360 | TTCTTTGTGTTAGCAAACTTATTTATAGAC | SEQ ID NO: 3726 | ATTATCCATTAAAGATTATACTATCCA | SEQ ID NO: 6092 |
| rs2524088 | AATGGTAGACCAAAATCCAACCATTA | SEQ ID NO: 1361 | AATGGTAGACCAAAATCCAACCATTG | SEQ ID NO: 3727 | AAGTGAAGAAATGACACGACC | SEQ ID NO: 6093 |
| rs3749962 | CAGCCTGTCCTGGACAGTTCCT | SEQ ID NO: 1362 | CAGCCTGTCCTGGACAGTTTCCC | SEQ ID NO: 3728 | AGGGACAGTTTGACCACTTC | SEQ ID NO: 6094 |
| rs1737085 | ACCCAGGGGCCTCAGAAAGACT | SEQ ID NO: 1363 | ACCCAGGGGCCTCAGAAAGACG | SEQ ID NO: 3729 | GTTTGTCCGAAAAGTGAGAG | SEQ ID NO: 6095 |
| rs7382817 | TTCCACTTGGTCATGAAGAATGAA | SEQ ID NO: 1364 | TTCCACTTGGTCATGAAGAATGAT | SEQ ID NO: 3730 | TTTTTAATATACTGTTGAATGTGGT | SEQ ID NO: 6096 |
| rs2394413 | GCTTTCCTGTTTTTGTTTTTCTTCTTCTTT | SEQ ID NO: 1365 | GCTTTCCTGTTTTTGTTTTTCTTCTTCTTC | SEQ ID NO: 3731 | CCCTCCCCTTGTTTGTTTTTA | SEQ ID NO: 6097 |
| rs2073151 | CATGCCCTGCTGCACTCCA | SEQ ID NO: 1366 | CATGCCCTGCTGCACTCCG | SEQ ID NO: 3732 | AATGACTTCTCGCAGAACTT | SEQ ID NO: 6098 |
| rs1058026 | TTCTCAGGTCTTTATTTGCTCTCTCAA | SEQ ID NO: 1367 | TTCTCAGGTCTTTATTTGCTCTCTCAC | SEQ ID NO: 3733 | TTCCAGGAATTGACTTATTTAATT | SEQ ID NO: 6099 |
| rs2272873 | AGCCTCAACACATCCTCTTCCCTT | SEQ ID NO: 1368 | AGCCTCAACACATCCTCTTCCCTC | SEQ ID NO: 3734 | GGTTTTCTGATCCTGACCTG | SEQ ID NO: 6100 |
| rs1632933 | TTGTAGTGATGGGGACCTGATCCT | SEQ ID NO: 1369 | TTGTAGTGATGGGGACCTGATCCC | SEQ ID NO: 3735 | GTAATCACAGGTCAGGGGAAG | SEQ ID NO: 6101 |
| rs1632939 | GACTCAGAGGAGCTGGAGTCAGACT | SEQ ID NO: 1370 | GACTCAGAGGAGCTGGAGTCAGACC | SEQ ID NO: 3736 | CCACACACATTGAGTGTGAG | SEQ ID NO: 6102 |
| rs3132704 | TGCTATTCCATCACTGGGTATTCCTT | SEQ ID NO: 1371 | TGCTATTCCATCACTGGGTATTCCTC | SEQ ID NO: 3737 | CTACTCTTTTCATGTTTCATTTATTT | SEQ ID NO: 6103 |
| rs2523611 | GCCTCTGTGGTCACAGCTCCCA | SEQ ID NO: 1372 | GCCTCTGTGGTCACAGCTCCCG | SEQ ID NO: 3738 | TGGACAAGTTTCCACTGAAG | SEQ ID NO: 6104 |
| rs3823313 | TCTACAATGGCATTCAATAAAGTGCAT | SEQ ID NO: 1373 | TTTACAATGGCATTCAATAAAGTGCAG | SEQ ID NO: 3739 | TGTTCCTGGTTAAAAAAAAAA | SEQ ID NO: 6105 |
| rs2524083 | TCCTTTCTGTATATCTGGGTCACCATT | SEQ ID NO: 1374 | TCCTTTCTGTATATCTGGGTCACCATC | SEQ ID NO: 3740 | AGTATCATTTCCCTTCAGCCT | SEQ ID NO: 6106 |
| rs983561 | CCACTCCGAAGTCAGCACAGAGA | SEQ ID NO: 1375 | CCACTCCGAAGTCAGCACAGAGC | SEQ ID NO: 3741 | TTAGGATATAGGACATTCTGTTGC | SEQ ID NO: 6107 |
| rs915660 | CCCAAAATGCATGAAATTCCCTTC | SEQ ID NO: 1376 | CCCAAAATGCATGAAATTCCCTTG | SEQ ID NO: 3742 | TCTGACTGATAAACCCTCACTC | SEQ ID NO: 6108 |
| rs1269839 | CCCCTCTCCCCACTTATTCTCCTA | SEQ ID NO: 1377 | CCCCTCTCCCCACTTATTCTCCTC | SEQ ID NO: 3743 | TTGGAATCTTCAACTTCTGAAG | SEQ ID NO: 6109 |
| rs2050190 | TCTGAAATGCCCTGTCTATAGGGCA | SEQ ID NO: 1378 | TCTGAAATGCCCTGTCTATAGGGCG | SEQ ID NO: 3744 | TTAGAAGATGGTCCACCCTATTA | SEQ ID NO: 6110 |
| rs8408 | CAGTCACCCCCACTTCCCACT | SEQ ID NO: 1379 | CAGTCACCCCCACTTCCCACC | SEQ ID NO: 3745 | GCAGTCTTGTAGCTAGAACTTCTC | SEQ ID NO: 6111 |
| rs3115573 | CCCCCCACTTCTTGAAAAGACTTATT | SEQ ID NO: 1380 | CCCCCCACTTCTTGAAAAGACTTATC | SEQ ID NO: 3746 | TTTTAATCTTTCTAACCACAGCA | SEQ ID NO: 6112 |
| rs2230365 | CTGCTAAGCCGGTGTCCCTCT | SEQ ID NO: 1381 | CTGCTAAGCCGCTGTCCCTCC | SEQ ID NO: 3747 | CCATGGGAATAAAGAATAAGGAT | SEQ ID NO: 6113 |
| rs2284178 | CACCAACCAAGGGCTGCTGA | SEQ ID NO: 1382 | CACCAACCAAGGGGTGCTGG | SEQ ID NO: 3748 | CATAAAGAATGTTGAAAAGAGCTT | SEQ ID NO: 6114 |
| rs720467 | GAGGCTTCACCCAGTTAGCCCA | SEQ ID NO: 1383 | GAGGCTTCACCCAGTTAGCCCG | SEQ ID NO: 3749 | GAGCTCTAAGGCTGTTCTGATC | SEQ ID NO: 6115 |
| rs1842399 | TCCTCCACTAGCATTATCCCCAGG | SEQ ID NO: 1384 | TCCTCCACTAGCATTATCCCCAGC | SEQ ID NO: 3750 | CAATGACTTTTAATGGTAATATGTG | SEQ ID NO: 6116 |
| rs2857106 | CAATGGAAAGTGAACAAAAGGTTCCT | SEQ ID NO: 1385 | CAATGGAAAGTGAACAAAAGGTTCCC | SEQ ID NO: 3751 | GTCAAAGAATTTAACTCCTCGTG | SEQ ID NO: 6117 |
| rs1894552 | TGGGGTTAACTCCCAATAAATCCAT | SEQ ID NO: 1386 | TGGGGAAACTCCCAATAAATCCAG | SEQ ID NO: 3752 | GTAAATTGAAAATATTGTGAGTTGA | SEQ ID NO: 6118 |
| rs1048664 | TGCTGAATTGTCACTCATGGGCT | SEQ ID NO: 1387 | TGCTGAATTGTCACTCATGGGCC | SEQ ID NO: 3753 | GAGAGTAGGAGACTGGAGACC | SEQ ID NO: 6119 |
| rs2076529 | GTCAATGGCGTCACTCACCAGT | SEQ ID NO: 1388 | GTCAATGGCGTCACTCACCAGC | SEQ ID NO: 3754 | CAGTCCTCCCTCTGTACTCTG | SEQ ID NO: 6120 |
| rs2269422 | TCTTCTCCAAGGCCTCCCTCTTA | SEQ ID NO: 1389 | TCTTCTCCAAGGCCTCCCTCTTG | SEQ ID NO: 3755 | CTAAGAAAAAGCCTTCAACCC | SEQ ID NO: 6121 |
| rs3135338 | CTTTTCTCTGGACATATGCAGCATTA | SEQ ID NO: 1390 | CTTTTCTCTGGACATATGCAGCATTG | SEQ ID NO: 3756 | TTGGAAATCTTTTTTCATTAAGC | SEQ ID NO: 6122 |
| rs3129907 | GGTCAAATAAAAGAAGGAATGGCAAA | SEQ ID NO: 1391 | GGTCAAATAAAAGAAGGAATGGCAAG | SEQ ID NO: 3757 | TATTTACTCAGCTGACTGAGAATT | SEQ ID NO: 6123 |
| rs2621413 | TCAGAGTATCCTTTCTCCTTTGCAAT | SEQ ID NO: 1392 | TCAGAGTATCCTTTCTCCTTTGCAAG | SEQ ID NO: 3758 | AATTGCTCTATGTTGTATCTCCTT | SEQ ID NO: 6124 |
| rs3129848 | TGTGTTTGTGACCAGAAATAAGCCAT | SEQ ID NO: 1393 | TGTGTTTGTGACCAGAAATAAGCCAC | SEQ ID NO: 3759 | GGAACTTAAATCTTGTTCGCAT | SEQ ID NO: 6125 |
| rs2395253 | TCCTCTCCCCTTCTCACCTTGAA | SEQ ID NO: 1394 | TCCTCTCCCCTTCTCACCTTGAG | SEQ ID NO: 3760 | AGATAAAAATTCTCTAGGCAGGA | SEQ ID NO: 6126 |
| rs3135365 | TTTTATCATTGTTACCAGCAAGAGGGT | SEQ ID NO: 1395 | TTTATCATTGTTACCAGCAAGAGGGG | SEQ ID NO: 3761 | ATTTCTATACAAACTACTCCGTC | SEQ ID NO: 6127 |
| rs2395106 | AGGATCTCATTTGGCATCCTGCA | SEQ ID NO: 1396 | AGGATCTCATTTGGCATCCTGCG | SEQ ID NO: 3762 | TGCATTTAGCTGTCGAGTCTT | SEQ ID NO: 6128 |
| rs2285796 | CAGTAGGGAGATGACAGAGCATTGTAT | SEQ ID NO: 1397 | CAGTAGGGAGATGACAGAGCATTGTAG | SEQ ID NO: 3763 | TTACACTGAGCAGAGTAAACAGAT | SEQ ID NO: 6129 |
| rs2284177 | ATGTGGCCAGTGGCTACCGTATC | SEQ ID NO: 1398 | ATGTGGCCAGTGGCTACCGTATG | SEQ ID NO: 3764 | GACAGCACAGACAGGAAACAT | SEQ ID NO: 6130 |
| rs3115563 | CACAAGTATTTTGCAGCAGCTATCATT | SEQ ID NO: 1399 | CACAAGTATTTTGCAGCAGCTATCATA | SEQ ID NO: 3765 | AAAATGTTCCAACAAGCAATTAT | SEQ ID NO: 6131 |
| rs2074477 | GAGAGCTGGAGCTGAAGTTCCCT | SEQ ID NO: 1400 | GAGAGCTGGAGCTGAAGTTCCCC | SEQ ID NO: 3766 | CAGACCAGGAACTACCACAC | SEQ ID NO: 6132 |
| rs2301755 | AACAGACAGGGACATCAGGCAAT | SEQ ID NO: 1401 | AACAGACAGGGACATCAGGCAAC | SEQ ID NO: 3767 | TAGACCCTCCTCCCTTCCTAT | SEQ ID NO: 6133 |
| rs2057727 | ACCGTTGTGCCACTGGACGAT | SEQ ID NO: 1402 | ACCGTTGTGCCACTGGACGAC | SEQ ID NO: 3768 | CTACACAGGAGTACAAGGTGG | SEQ ID NO: 6134 |
| rs2269705 | AACCCCCCTTCTGAGACTTGGAT | SEQ ID NO: 1403 | AACCCCCCTTCTGAGACTTGGAC | SEQ ID NO: 3769 | CCTGATCCTGACTTCTGATC | SEQ ID NO: 6135 |
| rs2076177 | GGGAGATGGGTAAAGAGGGGAAT | SEQ ID NO: 1404 | GGGAGATGGGTAAAGAGGGGAAC | SEQ ID NO: 3770 | AGGGGTCATGTCTTTTCTCAG | SEQ ID NO: 6136 |
| rs2071285 | GTGGGAGGGAGCGTGAGGCT | SEQ ID NO: 1405 | GTGGGAGGGAGCGTGAGGCA | SEQ ID NO: 3771 | GACATAGCATCAGATTCTCAGC | SEQ ID NO: 6137 |
| rs1109146 | GGCTCTCCATGGGTTCTTAGAGATT | SEQ ID NO: 1406 | GGCTCTCCATGGGTTCTTAGAGATC | SEQ ID NO: 3772 | TTTGCAAGGGATATGAAGGATA | SEQ ID NO: 6136 |
| rs2395178 | AGGGAACTGAAAGTCATTTCTCAAGTC | SEQ ID NO: 1407 | AGGGAACTGAAAGTCATTTCTCAAGTG | SEQ ID NO: 3773 | CCCAAATTTAGTAATCTCACAAG | SEQ ID NO: 6139 |
| rs1978029 | GCTCTTCTCACCAAAACTTAAGGCTCT | SEQ ID NO: 1408 | GCTCTTCTCACCAAAACTTAAGGCTCC | SEQ ID NO: 3774 | CAGAGTGTCTAATAGAAGTGAACAT | SEQ ID NO: 6140 |
| rs406359 | ACAGCCTAAGGAGGGAAACAAAAAT | SEQ ID NO: 1409 | ACAGCCTAAGGAGGGAAACAAAAAC | SEQ ID NO: 3775 | CCAGTCAACACATAGTGTGTTG | SEQ ID NO: 6141 |
| rs2239529 | GGTCATGAGGGAACGGAAGCA | SEQ ID NO: 1410 | GGTCATGAGGGAACGGAAGCG | SEQ ID NO: 3776 | GGAAACACTATGTTGCCTCC | SEQ ID NO: 6142 |
| rs2269425 | TCAAGTAGTCCGTGTCTGGCAAGT | SEQ ID NO: 1411 | TCAAGTAGTCCGTGTCTGGCAAGC | SEQ ID NO: 3777 | AATGGCAATGCTAAGTGACC | SEQ ID NO: 6143 |
| rs2073048 | ATTAGAAAGGTTAAGGAACCGCTCT | SEQ ID NO: 1412 | ATTAGAAAGGTTAAGGAACCGCTCC | SEQ ID NO: 3778 | AAACAATTTCCTGGATGTTTAAA | SEQ ID NO: 6144 |
| rs3806155 | AACAACCCAGGTATGCTGGTATTAATAA | SEQ ID NO: 1413 | AACAACCCAGGTATGCTGGTATTAATAT | SEQ ID NO: 3779 | TTGAAGATGAAGAAATTAGGACTT | SEQ ID NO: 6145 |
| rs436845 | TCACTGTGGGTGGAGGTAATGGTAT | SEQ ID NO: 1414 | TCACTGTGGGTGGAGGTAATGGTAC | SEQ ID NO: 3780 | CTCCTCCTGGGGGTATTTTA | SEQ ID NO: 6146 |
| rs434841 | CAGCCCCAGTGCGCTCCA | SEQ ID NO: 1415 | CAGCCCCAGTGCCCTCCG | SEQ ID NO: 3781 | CCCAGTTACTAATCCCTACCC | SEQ ID NO: 6147 |
| rs1555115 | GGATGGCTGTCACACCTGAAAGTG | SEQ ID NO: 1416 | GGATGGCTGTCACACCTGAAAGTC | SEQ ID NO: 3782 | TCCAGGGTAAGGTTTTCAG | SEQ ID NO: 6148 |
| rs2284174 | AAACCTGCACATATACCCCAGAATT | SEQ ID NO: 1417 | AAACCTGCACATATACCCCAGAATC | SEQ ID NO: 3783 | AAAATAAAAGTTGGGGAGGG | SEQ ID NO: 6149 |
| rs2239806 | CCTCCTATGATGCTTGTGTGAAACTT | SEQ ID NO: 1418 | CCTCCTATGATGCTTGTGTGAAACTC | SEQ ID NO: 3784 | GTGTTCTAACTGTTTCATAATATCTG | SEQ ID NO: 6150 |
| rs1610714 | GGATGTGTTGAGGCTGGACCAA | SEQ ID NO: 1419 | GGATGTGTTGAGGCTGGACCAG | SEQ ID NO: 3785 | TGTCCTCCTGAGGTCTGTC | SEQ ID NO: 6151 |
| rs2071269 | AGAGCGCGCTCATCTTTTTCCT | SEQ ID NO: 1420 | AGAGCGCGCTCATCTTTTTCCG | SEQ ID NO: 3786 | CTCCCGAACTAGGGACAAAG | SEQ ID NO: 6152 |
| rs1264302 | ATGCCTCATTTGCCTCTCGCT | SEQ ID NO: 1421 | ATGCCTCATTTGCCTCTCGCC | SEQ ID NO: 3787 | CTTTTCGACCACCATTTTG | SEQ ID NO: 6153 |
| rs1265099 | ATCGCTGGGGCAGGGCTAT | SEQ ID NO: 1422 | ATCGCTGGGGCAGGGCTAC | SEQ ID NO: 3788 | GTACTGTGTTCCCTTCTGCC | SEQ ID NO: 6154 |
| rs926070 | TGGTCCACAGAATTTTTATAGTTGGA | SEQ ID NO: 1423 | TGGTCCACAGAATTTTTATAGTTGGG | SEQ ID NO: 3789 | TATTCTATTGTATGATTTACTTGCC | SEQ ID NO: 6155 |
| rs1150738 | GGTGGAGGATCCTGGCTACCAA | SEQ ID NO: 1424 | GGTGGAGGATCCTGGCTACCAC | SEQ ID NO: 3790 | CTGAATCCGATACCGCTTCT | SEQ ID NO: 6156 |
| rs2075015 | AGGCCTGGCCCATCTGCAGA | SEQ ID NO: 1425 | AGGCCTGGCCCATCTGCAGG | SEQ ID NO: 3791 | GAGCCAGGCTGGTAGTGATAC | SEQ ID NO: 6157 |
| rs1576 | CAACCTTGACAGATGCTCCAGCTC | SEQ ID NO: 1426 | CAACCTTGACAGATGCTCCAGCTG | SEQ ID NO: 3792 | AATCCCCAGATGAGCAGCTA | SEQ ID NO: 6158 |
| rs2074482 | CGGGCCAACAATTACTCACATTTT | SEQ ID NO: 1427 | CGGGCCAACAATTACTCACATTTG | SEQ ID NO: 3793 | GTTCATTGTCCACAGTGTCACT | SEQ ID NO: 6159 |
| rs2076523 | GTCTGAGCATCGCATCCAAGATA | SEQ ID NO: 1428 | GTCTGAGCATCGCATCCAAGATG | SEQ ID NO: 3794 | AGATGGGCTGTTCTATGCG | SEQ ID NO: 6160 |
| rs2395182 | TCTGTTAGACATAGTCTCAGATGCCTATTT | SEQ ID NO: 1429 | TCTGTTAGACATAGTCTCAGATGCCTATTG | SEQ ID NO: 3795 | ATTACCGAGAGAGTAGTCTGACTG | SEQ ID NO: 6161 |
| rs241429 | GAGTGCACTCTGTACTAGACACAATAGAAA | SEQ ID NO: 1430 | GAGTGCACTCTGTACTAGACACAATAGAAG | SEQ ID NO: 3796 | CTACAATAGAAGGGAAAAGATATTG | SEQ ID NO: 6162 |
| rs565448 | TGGATTATGTTGTCCATCTAAACTTTTC | SEQ ID NO: 1431 | TGGATTATGTTGTCCATCTAAACTTTTTG | SEQ ID NO: 3797 | AACTTAGATTTTACTTAAAAAATTGC | SEQ ID NO: 6163 |
| rs1383265 | TCTGAATCACCACCTGGAGAAAAGT | SEQ ID NO: 1432 | TCTGAATCACCACCTGGAGAAAAGC | SEQ ID NO: 3798 | ACTCACAAATCTTCAATATCCTC | SEQ ID NO: 6164 |
| rs1150771 | TCCAAACCCTGTTCCAAAGCCT | SEQ ID NO: 1433 | TCCAAACCCTGTTCCAAAGCCC | SEQ ID NO: 3799 | GTCACCTACATGCCTGTCTGT | SEQ ID NO: 6165 |
| rs2284189 | CCTGCATCCCATACCGTTTCCA | SEQ ID NO: 1434 | CCTGCATCCCATACCGTTTCCG | SEQ ID NO: 3800 | CACTAGTCTGAGCACCCTCTG | SEQ ID NO: 6166 |
| rs3213484 | CCTCGAGGGCCTCCACCT | SEQ ID NO: 1435 | CCTCGAGGGCCTCCACCA | SEQ ID NO: 3801 | CAGGTAATATTTCAGCCATGAT | SEQ ID NO: 6167 |
| rs2856716 | CAATTTTTCTGATTGCCTCATATCAATA | SEQ ID NO: 1436 | CAATTTTTCTGATTGCCTCATATCAATT | SEQ ID NO: 3802 | GGTTCATATATTTCTTCAGCCTT | SEQ ID NO: 6168 |
| rs2076526 | CAGGGTTGCTGTGAGGCTCAA | SEQ ID NO: 1437 | CAGGGTTGOTGTGAGGCTCAG | SEQ ID NO: 3803 | GTCATCCTTAGGTGAGGTGG | SEQ ID NO: 6169 |
| rs3830122 | TGCTTATTCCAAATTGAACCTCTTTAA | SEQ ID NO: 1438 | TGCTTATTCCAAATTGAACCTCTTTAC | SEQ ID NO: 3804 | TGAGACTCTAAAGATTCAGAGCTTT | SEQ ID NO: 6170 |
| rs1882 | CACTGGCTCCACTGAGGGCA | SEQ ID NO: 1439 | CACTGGCTCCACTGAGGGCG | SEQ ID NO: 3805 | CTAGACTCTACAGCCAGGCG | SEQ ID NO: 6171 |
| rs512559 | ACTTTGCTGGGACAGGGAGGCT | SEQ ID NO: 1440 | ACTTTGCTGGGACAGGGAGGCC | SEQ ID NO: 3806 | TCAGTAAGAGGCTCAAGGG | SEQ ID NO: 6172 |
| rs2857102 | GTTCCATGGACTCTTAGGAATTAGACTA | SEQ ID NO: 1441 | GTTCCATGGACTCTTAGGAATTAGACTC | SEQ ID NO: 3807 | TACTACTACTAAGCATTCACTGGTG | SEQ ID NO: 6173 |
| rs2856698 | CTGCCTGGCCCAGCCTTCTG | SEQ ID NO: 1442 | CTGCCTGGCCCAGCCTTCTC | SEQ ID NO: 3808 | ACAGTTGACTACCCTGGCC | SEQ ID NO: 6174 |
| rs204989 | TTAAGTATTCACTATGCATCAAGTGCTTT | SEQ ID NO: 1443 | TTAAGTATTCACTATGCATCAAGTGCTTC | SEQ ID NO: 3809 | TTACATTATTAATACATCAACCCTATG | SEQ ID NO: 6175 |
| rs419788 | CACCAGTGTGCAGTGACCTGATTT | SEQ ID NO: 1444 | CACCAGTGTGCAGTGACCTGATTC | SEQ ID NO: 3810 | ATGTCCCTATCCTACAGATCTTC | SEQ ID NO: 6176 |
| rs986475 | CCTGAACACTGTCATTCACCCAAT | SEQ ID NO: 1445 | CCTGAACACTGTCATTCACCCAAC | SEQ ID NO: 3811 | AATTACTATTTGACCCCAGAGTG | SEQ ID NO: 6177 |
| rs2763979 | CAATTCCTGGTTCACTCCTGGACA | SEQ ID NO: 1446 | CAATTCCTGGTTCAGTCCTGGACG | SEQ ID NO: 3812 | TGTGTAGAAGTAGGACCTCACAG | SEQ ID NO: 6178 |
| rs1062470 | TCTTTGGTGAAGTAGCCCACAGGA | SEQ ID NO: 1447 | TCTTTGGTGAAGTAGCCCACAGGG | SEQ ID NO: 3813 | AGATTTTACCCTTACTGTAGGTCA | SEQ ID NO: 6179 |
| rs2523668 | CTGCTTTCCAGGCTTGGAGTCTT | SEQ ID NO: 1448 | CTGCTTTCCAGGCTTGGAGTCTG | SEQ ID NO: 3814 | CCTGTAGTACATCAATTCCAACA | SEQ ID NO: 6180 |
| rs2524069 | AGAACGTGAACAGGCCAAGAAAGA | SEQ ID NO: 1449 | AGAACGTGAACAGGCCAAGAAAGT | SEQ ID NO: 3815 | GATAAAGAAATCTCAGCAAAGAAG | SEQ ID NO: 6181 |
| rs3135339 | ACCTGTGGAAGTTGTGTCCACCG | SEQ ID NO: 1450 | ACCTGTGGAAGTTGTGTCCACCC | SEQ ID NO: 3816 | AGCTTAGAATCCTCATGTCATCT | SEQ ID NO: 6182 |
| rs206776 | CCTAATGGCAAGGTCCCATAAGCTT | SEQ ID NO: 1451 | CCTAATGGCAAGGTCCCATAAGCTC | SEQ ID NO: 3817 | TGCACACATTTTTAGAAAAGATT | SEQ ID NO: 6183 |
| rs1237485 | ATTAATGGGAAGGCTGCACGGT | SEQ ID NO: 1452 | ATTAATGGGAAGGCTGCACGGC | SEQ ID NO: 3818 | ACCGATTCTTTGAAAAATACTTG | SEQ ID NO: 6184 |
| rs805290 | TTGTGCAGGGTTGTATCCCCAA | SEQ ID NO: 1453 | TTGTGCAGGGTTGTATCCCCAG | SEQ ID NO: 3819 | ATCTGATGCAGTGATTCAATAAA | SEQ ID NO: 6185 |
| rs805268 | CCACCTCGTTCCACCCTTTAGTTAT | SEQ ID NO: 1454 | CCACCTCGTTCCACCCTTTAGTTAG | SEQ ID NO: 3820 | CTGACTTTAGGCTACTTTTCCTT | SEQ ID NO: 6186 |
| rs1345228 | GGTCACCTCCAGTGGAGTGGTA | SEQ ID NO: 1455 | GGTCACCTCCAGTGGAGTGGTG | SEQ ID NO: 3821 | GTCAAGAAATGTAATTTGTCCTTT | SEQ ID NO: 6187 |
| rs7742523 | GCCATTGGGAATAGTGCTGCTAT | SEQ ID NO: 1456 | GCCATTGGGAATAGTGCTGCTAC | SEQ ID NO: 3822 | AGCATGAGTGTACAATTATCTGTG | SEQ ID NO: 6188 |
| rs1053924 | GGGGGGACGTAAGGGAAGAATAATA | SEQ ID NO: 1457 | GGGGGGACGTAAGGGAAGAATAATG | SEQ ID NO: 3823 | TTATCTGGCTGTGTTTTTGTTA | SEQ ID NO: 6189 |
| rs1270942 | ACTGTCATCTCCCCATTGCCTTT | SEQ ID NO: 1458 | ACTGTCATCTCCCCATTGCCTTC | SEQ ID NO: 3824 | TCACTCAGTAGATGTCCCCTAA | SEQ ID NO: 6190 |
| rs3129872 | CCAAGCTCTTGGCCTGAGTTGT | SEQ ID NO: 1459 | CCAAGCTCTTGGCCTGAGTTGA | SEQ ID NO: 3825 | CATCTTGAAGTCTAGGACTCCA | SEQ ID NO: 6191 |
| rs805256 | ACTCAATGAGCAGGTCCCTCACTAT | SEQ ID NO: 1460 | ACTCAATGAGCAGGTCCCTCACTAC | SEQ ID NO: 3826 | GACAAGCTCTAGACATGATCTTG | SEQ ID NO: 6192 |
| rs3116998 | GGGGTCTGTCCTCGAAGCAGA | SEQ ID NO: 1461 | GGGGTCTGTCCTCGAAGCAGG | SEQ ID NO: 3827 | ACTGGGACTAAAGAAACAGAAAA | SEQ ID NO: 6193 |
| rs2517484 | TCTGTCCCTCCTTTCTCTGAATCCT | SEQ ID NO: 1462 | TCTGTCCCTCCTTTCTCTGAATCCC | SEQ ID NO: 3828 | TACTTAAATCACTCCCTGGCTAC | SEQ ID NO: 6194 |
| rs886398 | TACCTGCTGCTCATCCAGCCAGA | SEQ ID NO: 1463 | TACCTGCTGCTCATCCAGCCAGG | SEQ ID NO: 3829 | CAACAGGAAGTTGTCAATGATAT | SEQ ID NO: 6195 |
| rs984778 | ACCGTCATCCCTACCCAAGGAT | SEQ ID NO: 1464 | ACCGTCATCCCTACCCAAGGAC | SEQ ID NO: 3830 | TGTTTGTGGTATGAGTGGTTTTA | SEQ ID NO: 6196 |
| rs1819784 | GGGACAGCAAACCAAGACAAAAAT | SEQ ID NO: 1465 | GGGACAGCAAACCAAGACAAAAAC | SEQ ID NO: 3831 | GTTAGTTGTCTCAAAGACAAAAAC | SEQ ID NO: 6197 |
| rs537757 | AAGGGAATGCCCAGTACCTACTGAA | SEQ ID NO: 1466 | AAAGGGAATGCCCAGTACCTACTGAT | SEQ ID NO: 3832 | TGTTTGCCTTTATCTCTTTCAG | SEQ ID NO: 6198 |
| rs213199 | CTGTTGCTCGTTCATTGCCCAA | SEQ ID NO: 1467 | CTGTTGCTCGTTCATTGCCCAG | SEQ ID NO: 3833 | AGAAACTGATAGAAGAACCTAGGG | SEQ ID NO: 6199 |
| rs7762289 | ACATCTTAGCGTCCAGATGACCCA | SEQ ID NO: 1468 | ACATCTTAGCGTCCAGATGACCCC | SEQ ID NO: 3834 | CATATAGGTGTCCTTTAGTATGGA | SEQ ID NO: 6200 |
| rs1264709 | TGGAGCTAGGATTCTGGACATGAAT | SEQ ID NO: 1469 | TGGAGCTAGGATTCTGGACATGAAA | SEQ ID NO: 3835 | AAGTCCTTCCAACTAAATGTATTT | SEQ ID NO: 6201 |
| rs2071352 | GGAAAATGGGACCAAGAGGTCCT | SEQ ID NO: 1470 | GGAAAATGGGACCAAGAGGTCCA | SEQ ID NO: 3836 | GATAACCTTGGACAGACAAGGT | SEQ ID NO: 6202 |
| rs2213584 | TAAGGCCAGTCTTCAGTGTCCAAT | SEQ ID NO: 1471 | TAAGGCCAGTCTTCAGTGTCCAAC | SEQ ID NO: 3837 | TCTTTGCTCATTAAATCTGGAAT | SEQ ID NO: 6203 |
| rs7382138 | CTATGCATGCATGTGGCCGTT | SEQ ID NO: 1472 | CTATGCATGCATGTGGCCGTC | SEQ ID NO: 3838 | GAACTTTCTGGAGTATATTAAGGC | SEQ ID NO: 6204 |
| rs660550 | CACTCTTGGAGTCCTGGGGGT | SEQ ID NO: 1473 | CACTCTTGGAGTCCTGGGGGG | SEQ ID NO: 3839 | GATGGAAAACAAAGCAATACTT | SEQ ID NO: 6205 |
| rs3094626 | CTGAGTTTGCAGTGGAGAGTGAAAT | SEQ ID NO: 1474 | CTGAGTTTGCAGTGGAGAGTGAAAC | SEQ ID NO: 3840 | GCATGATAGTTACAAAATTGTCAG | SEQ ID NO: 6206 |
| rs130078 | CTGGCTGTGGACCTCAGAAGGG | SEQ ID NO: 1475 | CTGGCTGTGGACCTCAGAAGGC | SEQ ID NO: 3841 | CTTGTTCCCCAACATATTTTCT | SEQ ID NO: 6207 |
| rs1610647 | CCCTTACGGGTGTGTCCCCTT | SEQ ID NO: 1476 | CCCTAACGGGTGTGTCCCCTC | SEQ ID NO: 3842 | TAAGATGTCGCAGACTTTAAGC | SEQ ID NO: 6208 |
| rs2071594 | TCACTGCTACAACATGCAAGGAACTC | SEQ ID NO: 1477 | TCACTGCTACAACATGCAAGGAACTG | SEQ ID NO: 3843 | GCTAGACTTTACAGAATGATTCCT | SEQ ID NO: 6209 |
| rs393603 | CCCTCACCCCATTGCAAGTGT | SEQ ID NO: 1478 | CCCTCACCCCATTGCAAGTGA | SEQ ID NO: 3844 | AGTAGAATTATCCAGCAATTCAG | SEQ ID NO: 6210 |
| rs1034325 | TGCACTCCTAAGCTGCATATGCTTT | SEQ ID NO: 1479 | TGCACTCCTAAGCTGCATATGCTTC | SEQ ID NO: 3845 | GGTGATACTCTAAGAAGCCCAC | SEQ ID NO: 6211 |
| rs971570 | CAGGAATGGAGAGAAGGGTAATGGTT | SEQ ID NO: 1480 | CAGGAACTGGAGAGAAGGGTAATGGTG | SEQ ID NO: 3846 | TACCTCTTATTGTGGAAACCTGT | SEQ ID NO: 6212 |
| rs3115635 | CCATGTATTTGACTTGCAGCAGGT | SEQ ID NO: 1481 | CCATGTATTTGACTTGCAGCAGGC | SEQ ID NO: 3847 | CACAACAAATGTCAGGTGAATTA | SEQ ID NO: 6213 |
| rs2524172 | CACCCCATGCTTTACAGAACTGAA | SEQ ID NO: 1482 | CACCCCATGCTTTACAGAACTGAG | SEQ ID NO: 3848 | TCCACAGTCATACTCATCTCTC | SEQ ID NO: 6214 |
| rs2523746 | TACCCCAGGCAGCAATTGTGCT | SEQ ID NO: 1483 | TACCCCAGGCAGCAATTGTGCC | SEQ ID NO: 3849 | AGTACTCTGATGCATCTCATGAT | SEQ ID NO: 6215 |
| rs1362069 | GTGGCTCCTTACAATTCTCTGTGGT | SEQ ID NO: 1484 | GTGGCTCCTTACAATTCTCTGTGGC | SEQ ID NO: 3850 | TTCTTCCAATGTAAGTAGTTCTTG | SEQ ID NO: 6216 |
| rs3129203 | CTCATCTCCACCCCCACCTGT | SEQ ID NO: 1485 | CTCATCTCCACCCCCACCTGC | SEQ ID NO: 3851 | CTGGTCCATTCAAAACTACAAA | SEQ ID NO: 6217 |
| rs3871248 | GGGCCAAGAGGAAATACTCAGTTTTA | SEQ ID NO: 1486 | GGGCCAAGAGGAAATACTCAGTTTTG | SEQ ID NO: 3852 | ATGTGTCAGATTTAAGGCCATAT | SEQ ID NO: 6218 |
| rs4248157 | TGTGTGTCTGGGAGTGAGAACTTCT | SEQ ID NO: 1487 | TGTGTGTCTGGGAGTGAGAACTTCC | SEQ ID NO: 3853 | AGTCTATCTAAGGAATGGAGGG | SEQ ID NO: 6219 |
| rs3130140 | GTCTGTCCTCAGCAGTCTTTCCCT | SEQ ID NO: 1488 | GTCTGTCCTCAGCAGTCTTTCCCC | SEQ ID NO: 3854 | CTGACCTATGACTTCTGGGAAT | SEQ ID NO: 6220 |
| rs2524100 | TGGGGAACACCATTGAAGTAAAATCA | SEQ ID NO: 1489 | TGGGGAACACCATTGAAGTAAAATCG | SEQ ID NO: 3855 | AAAAATATCTGAGCATATGCTTC | SEQ ID NO: 6221 |
| rs1800625 | GAACAGGAGAGAAACCTGTTTGGAA | SEQ ID NO: 1490 | GAACAGGAGAGAAACCTGTTTGGAG | SEQ ID NO: 3856 | TTCGTGAAAGAAAATCATTTTT | SEQ ID NO: 6222 |
| rs2239709 | CCAAGTCCTTCATTTTGTCCAGGA | SEQ ID NO: 1491 | CCAAGTCCTTCATTTTGTCCAGGG | SEQ ID NO: 3857 | TGTAGTAGTTACGTGACCCGAA | SEQ ID NO: 6223 |
| rs241439 | TGAATTCTTCAGCCTCCCTCTTGA | SEQ ID NO: 1492 | TGAATTCACAGCCTCCCTCTTGC | SEQ ID NO: 3858 | CAAGAGTCTTTGTTTGCAGAGA | SEQ ID NO: 6224 |
| rs6907291 | GGGAAATAATGCCCACAGGACTCA | SEQ ID NO: 1493 | GGGAAATAATGCCCACAGGACTCC | SEQ ID NO: 3859 | CTAGTCCTTTGAGTTGTGCTG | SEQ ID NO: 6225 |
| rs6917477 | CAGGCCAATCTGGAAGATAAAAAAGC | SEQ ID NO: 1494 | CAGGCCAATCTGGAAGATAAAAAAGG | SEQ ID NO: 3860 | AAGGTAGATTCAAATGTAGGAGG | SEQ ID NO: 6226 |
| rs6923504 | CTCCATCCAAAAGACACTTCTGCTC | SEQ ID NO: 1495 | CTCCATCCAAAAGACACTTCTGCTG | SEQ ID NO: 3861 | CTCCTATCATGCCACACTCTAC | SEQ ID NO: 6227 |
| rs6906021 | CTCCCAGACTCTGGCTTCATGAT | SEQ ID NO: 1496 | CTCCCAGACTCTGGCTTCATGAC | SEQ ID NO: 3862 | AAACTCAGAGACTGAGATGTAGAC | SEQ ID NO: 6228 |
| rs2849015 | TGCCAGGTAGGATGCTATCACAATAT | SEQ ID NO: 1497 | TGCCAGGTAGGATGCTATCACAATAC | SEQ ID NO: 3863 | CCTAATTAGAGATGGTAGGGGT | SEQ ID NO: 6229 |
| rs2517462 | GCTACTCCTCGAGCTGTCTGACCA | SEQ ID NO: 1498 | GCTACTCCTCGAGCTGTCTGACCG | SEQ ID NO: 3864 | GCCTCTATCTGTTTTCCTCTG | SEQ ID NO: 6230 |
| rs7382297 | AAATAGCTTTGCCCTGTCATTTCCA | SEQ ID NO: 1499 | AAATAGCTTTGCCCTGTCATTTCCC | SEQ ID NO: 3865 | AAGAAAGCACTGCAGTTACTCA | SEQ ID NO: 6231 |
| rs6457713 | CCACTATAACCTACGGGGGAAAAAAA | SEQ ID NO: 1500 | CCACTATAACCTACGGGGGAAAAAAG | SEQ ID NO: 3866 | AACATAACCATGAACCAACTAAT | SEQ ID NO: 6232 |
| rs1075496 | GCTTTTTGCAACTGCCTAACATGTGT | SEQ ID NO: 1501 | GCTTTTTGCAACTGCCTAACATGTGG | SEQ ID NO: 3867 | GTTCTATAAATCCTCTTCCCCA | SEQ ID NO: 6233 |
| rs3131083 | GGTCTCAGCGATGATCAAGATATCAT | SEQ ID NO: 1502 | GGTCTCAGCGATGATCAAGATATCAC | SEQ ID NO: 3868 | TTTTGACACCACATTCAATGTAT | SEQ ID NO: 6234 |
| rs2256965 | CATCACTTCCTAAGCTCCCAGGACT | SEQ ID NO: 1503 | CATCACTTCCTAAGCTCCCAGGACC | SEQ ID NO: 3869 | TCTCTATGCAGATGCAAGAGAC | SEQ ID NO: 6235 |
| rs3093662 | TGAATGCCTGGAAGGTGAATACACA | SEQ ID NO: 1504 | TGAATGCCTGGAAGGTGAATACACG | SEQ ID NO: 3870 | ATGAATGGAGAGAGAAAACCAG | SEQ ID NO: 6236 |
| rs2395305 | CAATCAATTAAATGGTTTGCTGCCT | SEQ ID NO: 1505 | CAATCAATTAAATGGTTTGCTGCCA | SEQ ID NO: 3871 | TTTTCTCTTTCTATCAATTCAAGTC | SEQ ID NO: 6237 |
| rs3763304 | TGCTCACTGGAATCTCCATGAGCT | SEQ ID NO: 1506 | TGCTCACTGGAATCTCCATGAGCC | SEQ ID NO: 3872 | CCAAAAGTGTCAGGTAACACAG | SEQ ID NO: 6238 |
| rs2227126 | CCACGAATCCAGTGTAGGACACAA | SEQ ID NO: 1507 | CCACGAATCCAGTGTAGGACAGAG | SEQ ID NO: 3873 | ACGCAGTACTGCTGCTACATT | SEQ ID NO: 6239 |
| rs261946 | CCTCTGGAAGCTACAGGTCTGTTTCA | SEQ ID NO: 1508 | CCTCTGGAAGCTACAGGTCTGTTTCG | SEQ ID NO: 3874 | ATGGATCTATTCTTTTTCCTGG | SEQ ID NO: 6240 |
| rs4987411 | CTCCGATCCTAGAGTCCATTCCCT | SEQ ID NO: 1509 | CTCCGATGCTAGACTCCATTCCCC | SEQ ID NO: 3875 | ATGTATTTCTTCGTGGGAAAC | SEQ ID NO: 6241 |
| rs1633017 | AGGACCACGAGGCCATGAAAAT | SEQ ID NO: 1510 | AGGACCACGAGGCCATGAAAAC | SEQ ID NO: 3876 | GCTTTGGCTACAAATAGGTCAT | SEQ ID NO: 6242 |
| rs7382061 | CTGGACTTGGCCTCACGGCTA | SEQ ID NO: 1511 | CTGGACTTGGCCTCACGGCTG | SEQ ID NO: 3877 | TATAGGGTTAAATGAGAGAATGGA | SEQ ID NO: 6243 |
| rs3129980 | CTGAGGCCATCAGCACTGCAG | SEQ ID NO: 1512 | CTGAGGCCATCAGCACTGCAC | SEQ ID NO: 3878 | CACCTGGAACAGTCTTGTTAAA | SEQ ID NO: 6244 |
| rs3734838 | GGATTTGTGGTCCTTGGATTCACA | SEQ ID NO: 1513 | GGATTTGTGGTCCTTGGATTCACG | SEQ ID NO: 3879 | CACACAAAACAGAGGAACTTC | SEQ ID NO: 6245 |
| rs3129073 | GGGGTATGCTATGGAATAGGGTGAT | SEQ ID NO: 1514 | GGGGTATGCTATGGAATAGGGTGAC | SEQ ID NO: 3880 | GAACTTTGTGGATGACATACCA | SEQ ID NO: 6246 |
| rs1063355 | CTGCTCAAGAGAAGCACATGAAAAA | SEQ ID NO: 1515 | CTGCTCAAGAGAAGCACATGAAAAC | SEQ ID NO: 3881 | ATTACCTGACTTTAGAGCTTTTTT | SEQ ID NO: 6247 |
| rs994321 | GCCCCAGATTGGGTGTCTAAGAAT | SEQ ID NO: 1516 | GCCCCAGATTCCGTGTCTAAGAAC | SEQ ID NO: 3882 | CAATGTCCCCTAGTTAATATATTCT | SEQ ID NO: 6248 |
| rs3129809 | TTTTCTGCCTCTCACTGGAATTTTA | SEQ ID NO: 1517 | TTTTCTGCCTCTCACTGGAATTTTG | SEQ ID NO: 3583 | CCCTACACTTTGAACTCATTTC | SEQ ID NO: 6249 |
| rs7766854 | GGCATGTCTCACATGATGGCAGA | SEQ ID NO: 1518 | GGCATGTCTCACATGATGGCAGG | SEQ ID NO: 3884 | AAGAGAAGAATGACAGCAAGC | SEQ ID NO: 6250 |
| rs3763288 | GCTGTGCAGTAATCTAGGCTGAAGGA | SEQ ID NO: 1519 | GCTGTGCAGTAATCTAGGCTGAAGGG | SEQ ID NO: 3885 | GGGGAAAGCCTAGACTAAGATT | SEQ ID NO: 6251 |
| rs630379 | TCCTACTAAGTGAAATGTGGCATGGT | SEQ ID NO: 1520 | TCCTACTAAGTGAAATGTGGCATGGG | SEQ ID NO: 3886 | TATGTCTTGTGACTATGATTTGTG | SEQ ID NO: 6252 |
| rs2844845 | GCAGACTACATGCAAAAGCTATGGTGT | SEQ ID NO: 1521 | GCAGACTACATGCAAAAGCTATGGTGA | SEQ ID NO: 3887 | ATCTGAAATTCTGGAGGTATCAG | SEQ ID NO: 6253 |
| rs3130666 | TTTTTTGGTTCCTCCGACTTGTCTA | SEQ ID NO: 1522 | TTTTTTGGTTCCTCCGACTTGTCTG | SEQ ID NO: 3888 | ATCTCTTGTAGCTCAGGTTCC | SEQ ID NO: 6254 |
| rs2021723 | GCTGGCCATCTCTCCAGGTCTA | SEQ ID NO: 1523 | GCTGGCCATCTCTCCAGGTCTG | SEQ ID NO: 3889 | AGCCAGAGAAGATGATCTGAA | SEQ ID NO: 6255 |
| rs1634718 | TGAAGGGCTACGTGGAGTGTAAGGA | SEQ ID NO: 1524 | TGAAGGGCTACGTGGAGTGTAAGGG | SEQ ID NO: 3890 | CTGGTAATTTTGGCATGTGTTA | SEQ ID NO: 6256 |
| rs1264539 | CATGCATCTGTTGACATAACTGCAT | SEQ ID NO: 1525 | CATGCATCTGTTGACATAACTGCAC | SEQ ID NO: 3891 | TTTTCTACCATTTCTATTCATG | SEQ ID NO: 6257 |
| rs2844748 | TAGAACCCTGCTGGGAGATTGCT | SEQ ID NO: 1526 | TAGAACCCTGCTGGGAGATTGCA | SEQ ID NO: 3892 | TCATTCTCCAGAACCTCTGAG | SEQ ID NO: 6258 |
| rs805292 | CCCCCACTCGGTCTTTCCAATA | SEQ ID NO: 1527 | CCCCCACTCGGTCTTTCCAATG | SEQ ID NO: 3893 | CTGCTCAGCAATAAGTGACTC | SEQ ID NO: 6259 |
| rs7741884 | CTGGTACCTGCGCATTGCAGA | SEQ ID NO: 1528 | CTGGTACCTGCGCATTGCAGC | SEQ ID NO: 3894 | TCTCCTTCTCATTCTTAAGGC | SEQ ID NO: 6260 |
| rs2245420 | TGAACACCACTGGAGAGTTTCAAAC | SEQ ID NO: 1529 | TGAACACCACTGGAGAGTTTCAAAG | SEQ ID NO: 3895 | ACTGTCACCAAACAGGTACTGAT | SEQ ID NO: 6261 |
| rs259940 | GCAGACACTGATGGTCTTCAGATCACA | SEQ ID NO: 1530 | GCAGACACTGATGGTCTTCAGATCACG | SEQ ID NO: 3896 | TTTTAGTAGCAAGAATGTAGACCA | SEQ ID NO: 6262 |
| rs2853935 | TCAAAGCCTGGGACATTTATTTGT | SEQ ID NO: 1531 | TCAAAGCCTGGGACATTTATTTGC | SEQ ID NO: 3897 | CTAAACAAGCAGTTATTCTTCATC | SEQ ID NO: 6263 |
| rs6911467 | GGTGGCACTTGTCTGCAGTCCTA | SEQ ID NO: 1532 | GGTGGCACTTGTCTGCAGTCCTG | SEQ ID NO: 3898 | CTACTCTGAAGACTGAGGCAG | SEQ ID NO: 6264 |
| rs3132712 | CCAAACCTGCTTCCATCTTTTGATT | SEQ ID NO: 1533 | CCAAACCTGCTTCCATCTTTTGATC | SEQ ID NO: 3899 | CTGGACACACATGTTCTTCCTA | SEQ ID NO: 6265 |
| rs3763317 | AAGGGTGTTGCTGATGCCTCCT | SEQ ID NO: 1534 | AAGGGTGTTGCTGATGCCTCCC | SEQ ID NO: 3900 | GACTCCTTTTGTGAAAAGCAG | SEQ ID NO: 6266 |
| rs2853939 | CCCTAGCCAGTCTTGAGTCTCATCATT | SEQ ID NO: 1535 | CCCTAGCCAGTCTTGAGTCTCATCATC | SEQ ID NO: 3901 | TACGATTTCAGAACTATTGTGAAT | SEQ ID NO: 6267 |
| rs605203 | GGGAGTGTACGGCAGTTAAGGTAGTTT | SEQ ID NO: 1536 | GGGAGTGTACGGCAGTTAAGGTAGTTG | SEQ ID NO: 3902 | CGAGATTATAAAGCGTTTTCTTA | SEQ ID NO: 6268 |
| rs6457594 | GGGGCCATTGAACCACACATACA | SEQ ID NO: 1537 | GGGGCCATTGATCCACACATACG | SEQ ID NO: 3903 | GTTTGTCACTGGCCATTCTAAT | SEQ ID NO: 6269 |
| rs2144014 | TTGTTCTTCCTCAAGAATGCCAATT | SEQ ID NO: 1538 | TTGTTCTTCCTCAAGAATGCCAATC | SEQ ID NO: 3904 | TTCTTAGGTCATTTAACATAATCCC | SEQ ID NO: 6270 |
| rs2534790 | CCACAAGACAGTTACCTAGGATGCCTT | SEQ ID NO: 1539 | CCACAAGACAGTTACCTAGGATGCCTG | SEQ ID NO: 3905 | CTCCTTTACACTTCTACTCCCC | SEQ ID NO: 6271 |
| rs986522 | TGTTTTCAGCAGGGGTAGTGGTC | SEQ ID NO: 1540 | TGTTTTCACCAGGGGTAGTGGTG | SEQ ID NO: 3906 | TTACTGACAAAGCAGAATGGAA | SEQ ID NO: 6272 |
| rs805264 | CCTCCACCATAGGCTTCCCCT | SEQ ID NO: 1541 | CCTCCACCATAGGCTTCCCCC | SEQ ID NO: 3907 | ATCTCAGTCCATACCTGCTTC | SEQ ID NO: 6273 |
| rs7757269 | CAACTCTTAATTGGCCCTCAAAACTTA | SEQ ID NO: 1542 | CAACTCTTAATTGGCCCTCAAAACTTG | SEQ ID NO: 3908 | CCTACTTGCTTCTATCTTCAGAA | SEQ ID NO: 6274 |
| rs916570 | GCAAGCTCCCAAAGCATATTCCT | SEQ ID NO: 1543 | GCAAGCTCCCAAAGCATATTCCC | SEQ ID NO: 3909 | TAGAAACTCTGGGGTCATGAA | SEQ ID NO: 6275 |
| rs3093668 | CAAGGGACTTCCAGAGATTCGGG | SEQ ID NO: 1544 | CAAGGGACTTCCAGAGATTCGGC | SEQ ID NO: 3910 | GTCTAGGCTTCAAATCACCCT | SEQ ID NO: 6276 |
| rs928824 | TTGTTGGGTGATATGGTAAATGGATA | SEQ ID NO: 1545 | TTGTTGGGTGATATGGTAAATGGATG | SEQ ID NO: 3911 | GTAGCTGTTTAAGATATTGCCAT | SEQ ID NO: 6277 |
| rs3132682 | CAACTGAAAAAGGCAGGGTTGAC | SEQ ID NO: 1546 | CAACTGAAAAAGGCAGGGTTGAG | SEQ ID NO: 3912 | CACAGCAAGAACACAAGTCAG | SEQ ID NO: 6278 |
| rs4248148 | CCTAAAACACTCCCTCGGGCTAT | SEQ ID NO: 1547 | CCTAAAACACTCCCTCGGGCTAC | SEQ ID NO: 3913 | CCTTTGTAGTCCCATCCTCTT | SEQ ID NO: 6279 |
| rs707928 | CTGTGTTTTCCAGCACAGCCCT | SEQ ID NO: 1548 | CTGTGTTTTCCAGCACAGCCCC | SEQ ID NO: 3914 | GTTTCAAACATTCAGGCTCAC | SEQ ID NO: 6280 |
| rs3130375 | TTTATGGGCAGAACATTTGAAAGAAT | SEQ ID NO: 1549 | TTTATGGGCAGAACATTTGAAAGAAG | SEQ ID NO: 3915 | TAAATACTCAACAGGGAGCAGA | SEQ ID NO: 6281 |
| rs3097644 | GCATAGTTTTGAGTGTGCCTCTTTC | SEQ ID NO: 1550 | GCATAGTTTTGAGTGTGCCTCTTTG | SEQ ID NO: 3916 | AGGATGTATTTGAGTTCCGTTAT | SEQ ID NO: 6282 |
| rs1233397 | TGGCTACAAGTTTATGCCCCAGTAA | SEQ ID NO: 1551 | TGGCTACAAGTTTATGCCCCAGTAG | SEQ ID NO: 3917 | AATCAGTTCCAGTGCTCTTCAT | SEQ ID NO: 6283 |
| rs2023371 | TGATCCAGCAGGAAAAAAGAGGAT | SEQ ID NO: 1552 | TGATCCAGCAGGAAAAAAGAGGAC | SEQ ID NO: 3918 | CTCTCTAGTGGGGACACTCCT | SEQ ID NO: 6284 |
| rs2071540 | CGCACTTTTCAGCTGCGGA | SEQ ID NO: 1553 | CGCACTTTTCAGCTGCGGG | SEQ ID NO: 3919 | GTCTCCTCTTTTATCATCCTCAA | SEQ ID NO: 6285 |
| rs4713603 | TTCAGTGTTTGTCTCTTGCAGAAACA | SEQ ID NO: 1554 | TTCAGTGTGTCTCTTGCAGAAACG | SEQ ID NO: 3920 | GTTTGCTCACTTTGACTACCATA | SEQ ID NO: 6286 |
| rs3094014 | CATGTGGGATCCACAACACTTTAATTT | SEQ ID NO: 1555 | CATGTGGGATCCACAACACTTTAATTC | SEQ ID NO: 3921 | TAGTTTGCCTCAGGGCTATTATA | SEQ ID NO: 6287 |
| rs2856726 | TCTAGATTCGTGCCTGAATGAAATTTA | SEQ ID NO: 1556 | TCTAGATTCGTGCCTGAATGAAATTTT | SEQ ID NO: 3922 | TGGGTTTATAAGTATGGGTCTAGT | SEQ ID NO: 6288 |
| rs2735005 | ACCTGGGCAATGAAGTCAACACTA | SEQ ID NO: 1557 | ACCTGGGCAATGAAGTCAACACTG | SEQ ID NO: 3923 | GAATATCATCAATTTATGGAATACTG | SEQ ID NO: 6289 |
| rs241414 | ATTCCACTGATCTTGATGTTGCAT | SEQ ID NO: 1558 | ATTCCACTGATCTTGATGTTGCAG | SEQ ID NO: 3924 | GAATTCCACATTATGATTATGCC | SEQ ID NO: 6290 |
| rs2516400 | GTGGGCAGTGGGTTTTGCCT | SEQ ID NO: 1559 | GTGGGCAGTGGGTTTTGCCC | SEQ ID NO: 3925 | AGTAAAAACTCAGATAAACAACACC | SEQ ID NO: 6291 |
| rs2517416 | CGCTCATCTCCATGGCTATCGAT | SEQ ID NO: 1560 | CGCTCATCTCCATGGCTATCGAG | SEQ ID NO: 3926 | ATACTGGTCTCCTCCAGAACC | SEQ ID NO: 6292 |
| rs3749971 | CCAAAAAGTGGAAGAAGTGTAGCTGGA | SEQ ID NO: 1561 | CCAAAAAGTGGAAGAAGTGTAGCTGGG | SEQ ID NO: 3927 | GATACAGCCTAGAAAAGATATAGCC | SEQ ID NO: 6293 |
| rs6928431 | GCTGGGAACAGGGAGAATAAGAGAAGT | SEQ ID NO: 1562 | GCTGGGAACAGGGAGAATAAGAGAAGA | SEQ ID NO: 3928 | GATTAGAACAATTCTTTATTCACCA | SEQ ID NO: 6294 |
| rs6911693 | GATTAGCATAGCCATTGTGGGAAACA | SEQ ID NO: 1563 | GATTAGCATAGCCATTGTGGGAAACG | SEQ ID NO: 3929 | TATGGAGGTTCTGCAAAAAA | SEQ ID NO: 6295 |
| rs1269852 | TCTGAGGCTCCCTTGCCCCG | SEQ ID NO: 1564 | TCTGAGGCTCCCTTGCCCCC | SEQ ID NO: 3930 | TTTCAGCTGTAGCCTCTTAGTT | SEQ ID NO: 6296 |
| rs241457 | AAATGAGTTGATGGAACACCTCCA | SEQ ID NO: 1565 | AAATGAGTTGATTTGGAACACCTCCC | SEQ ID NO: 3931 | AATTTCTTCAGAAGCATCCTTG | SEQ ID NO: 6297 |
| rs2077102 | GTGAGCAAGGGTCGGGGAT | SEQ ID NO: 1566 | GTGAGCAAGGGTCGGGGAG | SEQ ID NO: 3932 | TCTAGTGCGTAACAGTCTAGGG | SEQ ID NO: 6298 |
| rs1736995 | AGCACAGGGGCTTTGGGTTGT | SEQ ID NO: 1567 | AGCACAGGGGCTTTGGGTTGC | SEQ ID NO: 3933 | TTGATCAAAGTTGTATCTACAGAA | SEQ ID NO: 6299 |
| rs241413 | TTGATGCTTCCTAACCATGAATGTA | SEQ ID NO: 1568 | TTGATGCTTCCTAACCATGAATGTG | SEQ ID NO: 3934 | CTCTCCATCTGTGCAGTACTTC | SEQ ID NO: 6300 |
| rs1362074 | ATGAAGGACTGCCTTCAAATAATTCAT | SEQ ID NO: 1569 | ATGAAGGACTGCCTTCAAATAATTCAC | SEQ ID NO: 3935 | ATAACTTTCTTGAATGACCATGT | SEQ ID NO: 6301 |
| rs2524222 | TGAGATAGAAATGGTTCTTTGTGGCA | SEQ ID NO: 1570 | TGAGATAGAAATGGTTCTTTGTGGCG | SEQ ID NO: 3936 | TCACAATTTATTGGAGAATGGA | SEQ ID NO: 6302 |
| rs2857768 | AGGCGTTCGAATATTGTTTCCTCT | SEQ ID NO: 1571 | AGGCGTTCGAAAATTGTTTCCTCC | SEQ ID NO: 3937 | TCTCCATTCAACACTGAGGAC | SEQ ID NO: 6303 |
| rs2394390 | AGCAGGCCTCTCGAGGGCA | SEQ ID NO: 1572 | AGCAGGCCTCTCGAGGGCG | SEQ ID NO: 3938 | CCATGTTTAGATTCTGAGATGG | SEQ ID NO: 6304 |
| rs3218819 | CTGCAGCTCCGACTCTGAGCCA | SEQ ID NO: 1573 | CTGCAGCTCCGACTCTGAGCCG | SEQ ID NO: 3939 | GGATAGAAAGAGGATGAGGAG | SEQ ID NO: 6305 |
| rs2736176 | TTGTGAAATGCAGTACTGTTTACCCTCG | SEQ ID NO: 1574 | TTGTGAAATGCAGTACTGTTACCCTCC | SEQ ID NO: 3940 | TTGTCTCTTACTACCCGATTCTA | SEQ ID NO: 6306 |
| rs885933 | GCCAGTCATAGCTGTCAACAATCCA | SEQ ID NO: 1575 | GCCAGTCATAGCTGTCAACTATCCG | SEQ ID NO: 3941 | AGATTCTCATTATCTTTTTACACAGC | SEQ ID NO: 6307 |
| rs2517889 | AGGTACTCAACCCGCTCTGGGA | SEQ ID NO: 1576 | AGGTACTCAACCCGCTCTGGGG | SEQ ID NO: 3942 | TACAGCAGGAAAGCAGAGTGT | SEQ ID NO: 6308 |
| rs2207337 | CCAAAGATGAAATGTCCCAGGAGT | SEQ ID NO: 1577 | CCAAAGATGAAATGTCCCAGGAGA | SEQ ID NO: 3943 | TATTCTGAAAGAAATAATTTTGACTC | SEQ ID NO: 6309 |
| rs4713293 | CATGATCCTGGTGATTTCAAAGACTAT | SEQ ID NO: 1578 | CATGATCCTGGTGATTTCAAAGACTAC | SEQ ID NO: 3944 | TACATGATCATTTAACACCAAGG | SEQ ID NO: 6310 |
| rs2040410 | CCTCATTAGGGAGTTGTGAGGAATA | SEQ ID NO: 1579 | CCTCATTAGGCAGTTGTGAGGAATG | SEQ ID NO: 3945 | ACATATACTGTACTTGGAATGAAAA | SEQ ID NO: 6311 |
| rs1557611 | GAGGGGAGGAGAAAGAGCCTAGTGT | SEQ ID NO: 1580 | GAGGGGAGGAGAAAGAGCCTAGTGC | SEQ ID NO: 3946 | GATGTTCAGAAAAAAGGTATAGTT | SEQ ID NO: 6312 |
| rs3129942 | TGCTGAAAGTTTTTTGATCACTCACTA | SEQ ID NO: 1581 | TGCTGAAAGTTTTTTGATCACTCACTC | SEQ ID NO: 3947 | TAAAAATGTTTTGAGTATGCATTG | SEQ ID NO: 6313 |
| rs3094138 | AGAAAAGAACTTTGGTTGTGGTCAT | SEQ ID NO: 1582 | AGTAAAGAACTTTGGTTGTGGTCAC | SEQ ID NO: 3948 | GATGCATGAAACAAATAAACAAG | SEQ ID NO: 6314 |
| rs3129304 | CCGTAATCTGTATTGCTCATTTTGGTCT | SEQ ID NO: 1583 | CCGTAATCTGTATTGCTCATTTTGGTCC | SEQ ID NO: 3949 | GACATAAACTATGTGGTATGGTGA | SEQ ID NO: 6315 |
| rs2071288 | TGATCCTCCCACAGAGCCTGTAT | SEQ ID NO: 1584 | TGATCCTCCCACAGAGCCTGTAC | SEQ ID NO: 3950 | GAGACAGGGAAAATTGAGAGC | SEQ ID NO: 6316 |
| rs6921644 | CCAAGGTGCTATCTGGTCCTATAGCT | SEQ ID NO: 1585 | CCAAGGTGCTATCTGGTCCTATAGCG | SEQ ID NO: 3951 | GCTTCTACAGTTTCCTTCTAATATC | SEQ ID NO: 6317 |
| rs206777 | CGTGTGCTCTGCTGTTCCTTTAAT | SEQ ID NO: 1586 | CGTGTGCTCTGCTGTTCCTTTAAC | SEQ ID NO: 3952 | TGTGGAGACAAGAACCTTTTG | SEQ ID NO: 6318 |
| rs17719 | GGGCTGTCACGGAGCGACTA | SEQ ID NO: 1587 | GGGCTGTCACGGAGCGACTG | SEQ ID NO: 3953 | CGAGATCGCCTAGTATGTTCT | SEQ ID NO: 6319 |
| rs1024470 | TCTTGACCTAACATTTCCATGTCTGA | SEQ ID NO: 1588 | TCTTGACCTAACATTTCCATGTCTGG | SEQ ID NO: 3954 | AGTTTGTCCTACAAATAGACTTGC | SEQ ID NO: 6320 |
| rs620202 | TACAGCCCTATGGGGATGGGGA | SEQ ID NO: 1589 | TACAGCCCTATGGGGATGGGGC | SEQ ID NO: 3955 | TAAGCAAAATGGGTGGAGTTA | SEQ ID NO: 6321 |
| rs409558 | GCGCGCAGAATGCAAAGCA | SEQ ID NO: 1590 | GCGCGCAGAATGCAAAGCG | SEQ ID NO: 3956 | TAAGTACTTCTGCTACAGGGCT | SEQ ID NO: 6322 |
| rs3117330 | TGAAATTGAAAAGTTGAGGCATTTTTTT | SEQ ID NO: 1591 | TGAAATTGAAAAGTTGAGGCATTTTTTC | SEQ ID NO: 3957 | TCCTGAAATGGCTTATATTTAAGT | SEQ ID NO: 6323 |
| rs2071481 | CAGACAGGTTTCTCCTGAAACTCTTTCA | SEQ ID NO: 1592 | CAGACAGGTTTCTCCTGAAACTCTTTCG | SEQ ID NO: 3958 | TATACGCCATGTACTGTTCATATC | SEQ ID NO: 6324 |
| rs2071544 | CCGTCCATCGGCTTCTCATTTT | SEQ ID NO: 1593 | CCGTCCATCGGCTTCTCATTTC | SEQ ID NO: 3959 | TCCTATTCAACCCTGAGAGCT | SEQ ID NO: 6325 |
| rs362512 | TCTAGAATATTGCTTCAAAAATGCCAA | SEQ ID NO: 1594 | TCTAGAATATTGCTTCAAAAATGCCAG | SEQ ID NO: 3960 | CAAACTCAGTCAGAAAGCTAGTG | SEQ ID NO: 6326 |
| rs1056032 | TAAGCATGGTCAATTCCCCCTTCT | SEQ ID NO: 1595 | TAAGCATGGTCAATTCCCCCTTCC | SEQ ID NO: 3961 | CCAAAGGAAATGGAGAAAAG | SEQ ID NO: 6327 |
| rs4711185 | CATCCCAAACCCTTAATTATATGCATCT | SEQ ID NO: 1596 | CATCCCAAACCCTTAATTATATGCATCC | SEQ ID NO: 3962 | TTACAATGTCCTTCAGCTATGTT | SEQ ID NO: 6328 |
| rs6457204 | CAGCCCTTAGCAACCACTAATCTGTTA | SEQ ID NO: 1597 | CAGCCCTTAGCAACCACTAATCTGTTT | SEQ ID NO: 3963 | TGCCTTTACGGATTTGTCTAT | SEQ ID NO: 6329 |
| rs7451190 | CATGATTAGGTCTTTTCAACACTGCATA | SEQ ID NO: 1598 | CATGATTAGGTCTTTTCAACACTGCATG | SEQ ID NO: 3964 | TCCCAAACAATACTGTTTTACAA | SEQ ID NO: 6330 |
| rs474534 | GATACGGGTGGGAGCTGCAACA | SEQ ID NO: 1599 | GATACGGGTGGGAGCTGCAACG | SEQ ID NO: 3965 | CGTTCCCTTACCCTGACATAT | SEQ ID NO: 6331 |
| rs1480380 | CGCAGGTTCTTGGGGCAGAT | SEQ ID NO: 1600 | CGCAGGTTCTTGGGGCAGAC | SEQ ID NO: 3966 | GTTTTAACTGAAGTCTCCATTTTA | SEQ ID NO: 6332 |
| rs6914285 | TGTCAGAGGGACACAGGAGTCAA | SEQ ID NO: 1601 | TGTCAGAGGGACACAGGAGTCAG | SEQ ID NO: 3967 | CTGAAAGAGCTCCCTATGGAC | SEQ ID NO: 6333 |
| rs3129953 | AAACAAGCAGTGTTTTCCACAAAAAT | SEQ ID NO: 1602 | AAACAAGCAGTGTTTTCCACAAAAAC | SEQ ID NO: 3968 | TCATCCTGGACTCTAAAATGG | SEQ ID NO: 6334 |
| rs6927487 | GTAACCCAGACTGTGGCAACCAT | SEQ ID NO: 1603 | GTAACCCAGACTGTGGCAACCAC | SEQ ID NO: 3969 | CAACTCTCCATATACCCCAG | SEQ ID NO: 6335 |
| rs3095151 | CCAGGTTTGAGGGAGTGAGTGCT | SEQ ID NO: 1604 | CCAGGTTTGAGGGAGTGAGTGCG | SEQ ID NO: 3970 | GTCCTACAGACAGGGAAATG | SEQ ID NO: 6336 |
| rs1573298 | CCCTATCACCTTTGCCTTATTCCATTG | SEQ ID NO: 1605 | CCCTATCACCTTTGCCTTATTCCATTC | SEQ ID NO: 3971 | TTAGAAGCAAGTCACAGATCC | SEQ ID NO: 6337 |
| rs3104395 | GGAAATGCAACATTTGGACAGGA | SEQ ID NO: 1606 | GGAAATGCAACATTTGGACAGGG | SEQ ID NO: 3972 | ATGCCTGTTCTCACCTAGGT | SEQ ID NO: 6338 |
| rs2395316 | GGAAAGTTTCAACAATAGGATCCAACAA | SEQ ID NO: 1607 | GGAAAGTTTCAACAATAGGATCCAACAG | SEQ ID NO: 3973 | TAGAAGAAAGAACTTCATAGCTCA | SEQ ID NO: 6339 |
| rs1264707 | AGAGAAGCACAAGACAAGAGGCCA | SEQ ID NO: 1608 | AGAGAAGCACAAGACAAGAGGCCG | SEQ ID NO: 3974 | GAATAAGCAAGTCATGCATT | SEQ ID NO: 6340 |
| rs3095313 | TGAGAGTCTAGGGAGGCCCACAA | SEQ ID NO: 1609 | TGAGAGTCTAGGGAGGCCCACAG | SEQ ID NO: 3975 | AGGAAATGATGTTCGGAAAG | SEQ ID NO: 6341 |
| rs2735054 | CAAAAAGCAACATTCAAGATAACCCATA | SEQ ID NO: 1610 | CAAAAAGCAACATTCAAGATAACCCATG | SEQ ID NO: 3976 | CATATGAATGCAACCTTGTACA | SEQ ID NO: 6342 |
| rs866390 | TCTGTCCATAAACATTCTCCATCAT | SEQ ID NO: 1611 | TCTGTCCATATTTCATTCTCCATCAG | SEQ ID NO: 3977 | TCACTTTCCATTTTTTCCTTTT | SEQ ID NO: 6343 |
| rs2523721 | GGAAGCCCTGAATTTTGTCTCTGTCT | SEQ ID NO: 1612 | GGAAGCCCTGAATTTTGTCTCTGTCC | SEQ ID NO: 3978 | TCCTTAGGGTACTCAGGTGGT | SEQ ID NO: 6344 |
| rs2239600 | ACTCCCTTCTTCTCAAGAGATTTCCA | SEQ ID NO: 1613 | ACTCGCTTCTTCTCAAGAGATTTCCG | SEQ ID NO: 3979 | ATCTTCTCATGGTAATTGCTGA | SEQ ID NO: 6345 |
| rs2747466 | TGACTTTAATTCATTCCTGGGCATT | SEQ ID NO: 1614 | TGACTTTAATTCATTCCTGGGCATC | SEQ ID NO: 3980 | TGCCACTATAAAAAGTATTAAACC | SEQ ID NO: 6346 |
| rs1029239 | TCTTGGCGTCTGTGGTGAATAATC | SEQ ID NO: 1615 | TCTTGGCGTCTGTGGTGAATAATG | SEQ ID NO: 3981 | AATTGAGTATCATTTCTTTACTTTTG | SEQ ID NO: 6347 |
| rs2523676 | GCAAAGCTCCTGAGTGGAATTCCT | SEQ ID NO: 1616 | GCAAAGCTCCTGAGTGGAATTCCC | SEQ ID NO: 3982 | CTGCATTATAAGGGTGAGGCT | SEQ ID NO: 6348 |
| rs3757335 | CCAGTGAGGAAAGATCCCACCTTA | SEQ ID NO: 1617 | CCAGTGAGGAAAGATCCCACCTTC | SEQ ID NO: 3983 | GCAGCTACCAAGATTTTTGGT | SEQ ID NO: 6349 |
| rs760070 | CAGCACTTGGGATTGGGGTTAAA | SEQ ID NO: 1616 | CAGCACTTGGGATTGGGGTTAAG | SEQ ID NO: 3984 | CTTTAAAAACGGCTGTCAGGT | SEQ ID NO: 6350 |
| rs2442719 | GAGGCCAGGAGGGCTGGACA | SEQ ID NO: 1619 | GAGGCCAGGAGGGCTGGACG | SEQ ID NO: 3985 | AGAGAAACTGAGGTGAGGTCAG | SEQ ID NO: 6351 |
| rs1573297 | GAACCTGAATTCTGCCAACAACCT | SEQ ID NO: 1620 | GAACCTGAATTCTGCCAACAACCC | SEQ ID NO: 3986 | AGTGAGCTTGGAAGCAGATT | SEQ ID NO: 6352 |
| rs3132569 | ATAATGACATGAGCGAGCGCCAAT | SEQ ID NO: 1621 | ATAATGACATGAGCGAGCGCCAAC | SEQ ID NO: 3987 | TAATAGCCTTGGCAGTAAACG | SEQ ID NO: 6353 |
| rs2844523 | ACCCCGTCTGCTCTACCCCATT | SEQ ID NO: 1622 | ACCCCGTCTGCTCTACCCCATC | SEQ ID NO: 3988 | ACTACGTTTTCTCCCTCAGC | SEQ ID NO: 6354 |
| rs2077573 | AGGCAGGAGGAGAAGCAAGTTGTA | SEQ ID NO: 1623 | AGGCAGGAGGAGAAGCAAGTTGTG | SEQ ID NO: 3989 | GATCAGCTACATCTGGGCTT | SEQ ID NO: 6355 |
| rs2249168 | GAGCTCTCATGAGAAAGCCCAACT | SEQ ID NO: 1624 | GAGCTCTCATGAGAAAGCCCAACC | SEQ ID NO: 3990 | GGATGTGAAAACTTGGAATC | SEQ ID NO: 6356 |
| rs2844780 | GAATCTTGCACCTTAAACTCACACATCA | SEQ ID NO: 1625 | GAATCTTGCACCTTAAACTCACACATCC | SEQ ID NO: 3991 | AATCCACTATCTCTCTCATTCTTC | SEQ ID NO: 6357 |
| rs6457655 | TTAGTATGGCCACTAGGGAAAACATT | SEQ ID NO: 1626 | TTAGTATGGCCACTAGGGAAAACATG | SEQ ID NO: 3992 | TGAAGGTTCTTCAAAAAGTTAAA | SEQ ID NO: 6358 |
| rs7770024 | GAGGAGAGGAGGATGCACAGATGA | SEQ ID NO: 1627 | GAGGAGAGGAGGATGCACAGATGG | SEQ ID NO: 3993 | ACTATAACAGAAAGAGAAGAGAGAGA | SEQ ID NO: 6359 |
| rs458434 | GGGTCACAATTATTTAGGCAAATCACTT | SEQ ID NO: 1628 | GGGTCACAATTATTTAGGCAAATCACTG | SEQ ID NO: 3994 | ATCCCCATAATCAAAGTATTCC | SEQ ID NO: 6360 |
| rs204894 | TCATTTGAAACCGTCCAGATCAAT | SEQ ID NO: 1629 | TCATTTGAAACCGTCCAGATCAAC | SEQ ID NO: 3995 | TTATCCCCACCTCTGATGATT | SEQ ID NO: 6361 |
| rs6905949 | TGCTGGACTTGCACTAATTTGTACAGTT | SEQ ID NO: 1630 | TGCTGGAGTTGCACTAATTTGTACAGTC | SEQ ID NO: 3996 | ACTTCGTACTTTGACACACACC | SEQ ID NO: 6362 |
| rs3135376 | TGTTATTCTCGTGTGATGAGAATCTCAA | SEQ ID NO: 1631 | TGTTATTCTCGTGTGATGAGAATCTCAG | SEQ ID NO: 3997 | ACAGTGAGGTTTAGTAACAAGTCA | SEQ ID NO: 6363 |
| rs1018434 | TTGGGACTTGTGAGGTATCACTCAT | SEQ ID NO: 1632 | TTGGGACTTGTGAGGTATCACTCAC | SEQ ID NO: 3998 | TGGTGCTGGATTTTCTCATAG | SEQ ID NO: 6364 |
| rs204879 | AACTCCACCACAAAACATACTGCATT | SEQ ID NO: 1633 | AACTCCACCACAAAACATACTGCATC | SEQ ID NO: 3999 | CTCACTGTCTGCAGACATCTG | SEQ ID NO: 6365 |
| rs3129943 | CCATAAAACTGCCTGTGAAAGTAAAAA | SEQ ID NO: 1634 | CCATAAAACTGCCTGTGAAAGTAAAAG | SEQ ID NO: 4000 | TCTGAAGAATATTGAGCTCTGAA | SEQ ID NO: 6366 |
| rs7772569 | TCCTGCTTCATCCAGCCAGAATAT | SEQ ID NO: 1635 | TCCTGCTTCATCCAGCCAGAATAC | SEQ ID NO: 4001 | GCGAACCTTGTTCTATTTGCT | SEQ ID NO: 6367 |
| rs2248902 | TGGTCCATAGATTCATTTCTCACTCACT | SEQ ID NO: 1636 | TGGTCCATAGATTCATTTCTCACTCACC | SEQ ID NO: 4002 | CTTGGAGAAAACTATGGAAAAC | SEQ ID NO: 6368 |
| rs2517449 | TGTGTCATCTTCTCATGGGCCAA | SEQ ID NO: 1637 | TGTGTCATCTTCTCATGGGCCAG | SEQ ID NO: 4003 | GTGGTCCTTTTTGCATGTTTTA | SEQ ID NO: 6369 |
| rs2659448 | AGTGTCTCATGGAGAGGCCCTTA | SEQ ID NO: 1638 | AGTGTCTCATGGAGAGGCCCTTG | SEQ ID NO: 4004 | TTCCTGTAGCGAAAGGGTAGATA | SEQ ID NO: 6370 |
| rs2857694 | GGCGGGGCCTTCCAGTTATTAA | SEQ ID NO: 1639 | GGCGGGGCCTTCCAGTTATTAT | SEQ ID NO: 4005 | TTACGTCATGCAAATGAGGT | SEQ ID NO: 6371 |
| rs3132671 | CCTCCTCCTGCAGCTTTGCATAT | SEQ ID NO: 1640 | CCTCCTCCTGCAGCTTTGCATAC | SEQ ID NO: 4006 | CTGTATTTCTACAATAGCACTATCAC | SEQ ID NO: 6372 |
| rs2395301 | GCACTGTCCTACTCAGCAGCGAATA | SEQ ID NO: 1641 | GCACTGTCCTACTCAGCAGCGAATG | SEQ ID NO: 4007 | AGACCAGCTTGTGAGACATG | SEQ ID NO: 6373 |
| rs2516455 | GGAAAAATCTACTGGCAATGGAATCTT | SEQ ID NO: 1642 | GGAAAAATCTACTGGCAATGGAATCTG | SEQ ID NO: 4008 | CAGTTAGTTGTTAATTAACTGGAAA | SEQ ID NO: 6374 |
| rs2294472 | GCAAGCAGGTAATGGGAAAGTTTTTAA | SEQ ID NO: 1643 | GCAAGCAGGTAATGGGAAAGTTTTTAG | SEQ ID NO: 4009 | AATGCAAGGGAATAACACAGA | SEQ ID NO: 6375 |
| rs2077580 | CCCACTCATGGCCACAGCTTT | SEQ ID NO: 1644 | CCACTCATGGCCACAGCTTC | SEQ ID NO: 4010 | CTCTCCTTCCTCACAAGACC | SEQ ID NO: 6376 |
| rs1061783 | GGGGAACCACAGTTTCACCATCA | SEQ ID NO: 1645 | GGGGAACCACAGTTTCACCATCG | SEQ ID NO: 4011 | CCGCCCATtCTACTACTCAAC | SEQ ID NO: 6377 |
| rs3135024 | TTCAGCTCCTTGAGGCTGTGGA | SEQ ID NO: 1646 | TTCAGCTCCTTGAGGCTGTGGG | SEQ ID NO: 4012 | CAGAAACTTCTGGAAGCCACT | SEQ ID NO: 6378 |
| rs204994 | GTGGATCCCACTGTCACCCCA | SEQ ID NO: 1647 | GTGGATCCCACTGTCACCCCG | SEQ ID NO: 4013 | CTGACTGTTTTGCACACTTC | SEQ ID NO: 6379 |
| rs1059174 | CACCTAAACTGAGTCAAGCTGGCTAA | SEQ ID NO: 1648 | CACCTAAACTGAGTCAAGCTGGCTAG | SEQ ID NO: 4014 | TCCAAATATATGTATATCTTTTCACC | SEQ ID NO: 6380 |
| rs1233422 | CGTGATGTTCACTGTCTGCCAAGA | SEQ ID NO: 1649 | CGTGATGTTCACTGTCTGCCAAGG | SEQ ID NO: 4015 | TGATCAGCTGTAGGCATCAC | SEQ ID NO: 6381 |
| rs7772297 | GCTGGAAGTCATCGTCAGCAAAG | SEQ ID NO: 1650 | GCTGGAAGTCATCGTCAGCAAAC | SEQ ID NO: 4016 | AACATGGGAACAGATAACCTAA | SEQ ID NO: 6382 |
| rs3132613 | GATCATCTCCCCTGCTGGAAACG | SEQ ID NO: 1651 | GATCATCTCCCCTGCTGGAAACC | SEQ ID NO: 4017 | AATCAGAGATCTTTATTTTATTCAGT | SEQ ID NO: 6383 |
| rs2272592 | TCCATGTCGCCCACATTTTAAAT | SEQ ID NO: 1652 | TCCATGTCGCCCACACTTTAAAC | SEQ ID NO: 4018 | CCCATTGCGTAAAAACACTT | SEQ ID NO: 6384 |
| rs2523790 | GGAGAAGGTCCCTCCAGGAGAA | SEQ ID NO: 1653 | GGAGAAGGTCCCTCCAGGAGAC | SEQ ID NO: 4019 | TTCATGATGAGGAAAAACCC | SEQ ID NO: 6385 |
| rs2071476 | CATGAGACGGTTATTTTGAGAACCACA | SEQ ID NO: 1654 | CATGAGACGGTTATTTTGAGAACCACG | SEQ ID NO: 4020 | TCTATATGTGAACACAGTTTAAAAGC | SEQ ID NO: 6386 |
| rs2105903 | GCTTTTACACCATTGAAAAGTCAAAAAA | SEQ ID NO: 1655 | GCTTTTACACCATTGAAAAGTCAAAATAT | SEQ ID NO: 4021 | CCTAAGTCAAACCATCTTAAGTCA | SEQ ID NO: 6387 |
| rs7382555 | TGACAATAATTTGTTTGGCTAGGGTAA | SEQ ID NO: 1656 | TGACAATAATTTGTTTGGCTAGGGTAG | SEQ ID NO: 4022 | CAGAAATTGTTTACTCCAATCTAG | SEQ ID NO: 6388 |
| rs3115663 | AAACACAGTGAAAGAAACAGGAAAGAA | SEQ ID NO: 1657 | AAACACAGTGAAAGAAACAGGAAAGAG | SEQ ID NO: 4023 | ACAGAGAAAACATAACCCAGAAG | SEQ ID NO: 6389 |
| rs492899 | CAGGGCTGGGGGTGTGTGTAT | SEQ ID NO: 1658 | CAGGGCTGGGGGTGTGTGTAC | SEQ ID NO: 4024 | TAGAGCCTTTGCTGATCCTTT | SEQ ID NO: 6390 |
| rs707939 | GAGAGTGGGTGTAGCCTTCAGATGTA | SEQ ID NO: 1659 | GAGAGTGGGTGTAGCCTTCAGATGTC | SEQ ID NO: 4025 | TTTGGGGGAGATATTAGGCTTA | SEQ ID NO: 6391 |
| rs3094614 | CTCCTGCCGAACTTCGCCA | SEQ ID NO: 1660 | CTCCTGCGGAACTTCGOCG | SEQ ID NO: 4026 | CCAATGGGAACCTTAGTCTCT | SEQ ID NO: 6392 |
| rs2734990 | GCTAAGTACTTCCAGGAAACTCATTCAT | SEQ ID NO: 1661 | GCTAAGTACTTCCAGGAAACTCATTCAA | SEQ ID NO: 4027 | TGGTAAACATCATTAAGCACCTA | SEQ ID NO: 6393 |
| rs2273612 | ACCTAGGTCTTCCTGGGAGGGTA | SEQ ID NO: 1662 | ACCTAGCTCTTCCTGGGAGGGTG | SEQ ID NO: 4028 | CATAGGACCCAGAGTGAGGAG | SEQ ID NO: 6394 |
| rs438999 | AGTCACCTGGCCAGAAGGGATACT | SEQ ID NO: 1663 | AGTCACCTGGCCAGAAGGGATACC | SEQ ID NO: 4029 | AGTTGGAAACCCCATAAGG | SEQ ID NO: 6395 |
| rs206786 | GGGATGGGGAAAGAGAATGTGACA | SEQ ID NO: 1664 | GGGATGGGGAAAGAGAATGTGACC | SEQ ID NO: 4030 | AGAATTGAGATAGTAAGGATAATTTCA | SEQ ID NO: 6396 |
| rs362536 | GAAATGTCTGCAATATCTAGATTGGGAA | SEQ ID NO: 1665 | GAAATGTCTGCAATATCTAGATTGGGAG | SEQ ID NO: 4031 | ATATTTCTGAATGGAGTATGAGG | SEQ ID NO: 6397 |
| rs2523395 | GAGAGTGATGATGGCTACATAACATTGT | SEQ ID NO: 1666 | GAGAGTGATGATGGCTACATAACATTGC | SEQ ID NO: 4032 | AACCTACTAATTGTCACTGCATT | SEQ ID NO: 6398 |
| rs1064190 | ACCAGCCCTCCTCTGTGGGACT | SEQ ID NO: 1667 | ACCAGCCCTCCTCTGTGGGACG | SEQ ID NO: 4033 | AGAACTATCCTGTGGTCCTGC | SEQ ID NO: 6399 |
| rs3130267 | GGATGTTGTGCGCTGAGGGA | SEQ ID NO: 1668 | GGATGTTGTGCGCTGAGGGC | SEQ ID NO: 4034 | CTTTTTGGTGGTCTTGGTCTT | SEQ ID NO: 6400 |
| rs7762933 | AGGAAAGCGGAATGAAAGCAGGT | SEQ ID NO: 1669 | AGGAAAGCGGAATGAAAGCAGGC | SEQ ID NO: 4035 | AAAAGTGGCTGGGAGAAGAT | SEQ ID NO: 6401 |
| rs3094211 | CCCAGGCCCAACTTACCCCA | SEQ ID NO: 1670 | CGCAGGCCCAACTTACCCCG | SEQ ID NO: 4036 | GGTTCCTCCATGACTCTTTC | SEQ ID NO: 6402 |
| rs3129932 | TCTTCACATCCTGAAGTTGGTACTCTTC | SEQ ID NO: 1671 | TCTTCACATCCTGAAGTTGGTACTCTTG | SEQ ID NO: 4037 | CAATCATAATTACCCTAACTGTGT | SEQ ID NO: 6403 |
| rs2275855 | AAACCAAGGGCAGGATCAGGAA | SEQ ID NO: 1672 | AAACCAAGGGCAGGATCAGGAG | SEQ ID NO: 4038 | AACAAGGAAAGCAGATGTGG | SEQ ID NO: 6404 |
| rs2516399 | TTTTAATTCCAGGAAATAAATGCCCA | SEQ ID NO: 1673 | TTTTAATTCCAGGAAATAAATGCCCG | SEQ ID NO: 4039 | GACTCAGATATAAAAAGGAGAATCT | SEQ ID NO: 6405 |
| rs2857210 | AGAAGAGTAGAGTGGGCCCTTATGTACT | SEQ ID NO: 1674 | AGAAGAGTAGAGTGGGCCCTTATGTACC | SEQ ID NO: 4040 | TGAAGAAGTGAAGAATATAACCTG | SEQ ID NO: 6406 |
| rs7357044 | TGGAAATTAAATTTTTAGCCACTCAAT | SEQ ID NO: 1675 | TGGAAATTAAATTTTTAGCCACTCAAC | SEQ ID NO: 4041 | GAAAGTATATTAGCTTTGGGAGTG | SEQ ID NO: 6407 |
| rs592229 | CAGTGGCTCGTCTCCACCCA | SEQ ID NO: 1676 | CAGTGGCTCGTCTCCACCCC | SEQ ID NO: 4042 | TCCTCAGACAGCACACTCTC | SEQ ID NO: 6408 |
| rs2844773 | TGAAACCATCAAGGCAATGTGATAT | SEQ ID NO: 1677 | TGAAACCATCAAGGCAATGTGATAG | SEQ ID NO: 4043 | CTTACTTCCATAAAAGATATAAAACC | SEQ ID NO: 6409 |
| rs2523459 | GGTGGTGGGTTTTAATGAACATTTTCT | SEQ ID NO: 1678 | GGTGGTGGGTTTTAATGAACATTTTCG | SEQ ID NO: 4044 | TTTTAAAACTCTGTAACTATTTCGTT | SEQ ID NO: 6410 |
| rs2734962 | ACATATCGTTTTACCACAATTTCACCA | SEQ ID NO: 1679 | ACATATCGTTTTACCACAATTTCACCG | SEQ ID NO: 4045 | TTTCCTATTGATGTACATGTGG | SEQ ID NO: 6411 |
| rs2894046 | CCTGCTGCCTCCCCAAACTCT | SEQ ID NO: 1680 | CCTGCTGCCTCCCCAAACTCC | SEQ ID NO: 4046 | TCGTCCTCTTCTCCTTCAAC | SEQ ID NO: 6412 |
| rs15574 | GGGGTACATATGGGAGCCTGGA | SEQ ID NO: 1681 | GGGGTACATATGGGAGCCTGGG | SEQ ID NO: 4047 | TTGGGGAGTCAGCTCTGTAC | SEQ ID NO: 6413 |
| rs6919855 | ACATGCACAGTATTTGAAATCTGTGTA | SEQ ID NO: 1682 | ACATGCACAGTATTTGAAATCTGTGTG | SEQ ID NO: 4048 | ATTTACACATGCATACGTATGTTT | SEQ ID NO: 6414 |
| rs1362076 | CCAGCTCCATCCCGTCAATGA | SEQ ID NO: 1683 | CCAGCTCCATCCCGTCAATGC | SEQ ID NO: 4049 | CTATAGCCATCACAGCAGCAC | SEQ ID NO: 6415 |
| rs740864 | GCCCTGATGGCCACTGAGCT | SEQ ID NO: 1684 | GCCCTGATGGCCACTGAGCC | SEQ ID NO: 4050 | TGCTCATTCTCCTGACCATAG | SEQ ID NO: 6416 |
| rs6922512 | GTTTGGATACAAAGGACAGGAGACTAT | SEQ ID NO: 1685 | GTTTGGATACAAAGGACAGGAGACTAC | SEQ ID NO: 4051 | GGATGTCTGTTCTAAAAGAGAGTG | SEQ ID NO: 6417 |
| rs6926737 | GAACTTTATGAAATTATTCCTGCCTCAA | SEQ ID NO: 1686 | GAACTTTATGAAATTATTCCTGCCTCAG | SEQ ID NO: 4052 | AACCCTAATTTCATGAGACAATAT | SEQ ID NO: 6418 |
| rs2523747 | AATTCAGGCACTGCATTCCTCA | SEQ ID NO: 1687 | ATTCAGGCACTTTGCATTCCTCG | SEQ ID NO: 4053 | AGGACACTCCAGCAGCATAC | SEQ ID NO: 6419 |
| rs2023470 | TGGCTACAAGGAATGGGCAGTT | SEQ ID NO: 1688 | TGGCTTTACAAGGAATGGGCAGTG | SEQ ID NO: 4054 | TTTGCACATGTGCCATATTC | SEQ ID NO: 6420 |
| rs2239839 | GAGTCCAGGTTGACTGATGGGGT | SEQ ID NO: 1689 | GAGTCCAGGTTGACTGATGGGGG | SEQ ID NO: 4055 | GCATGAGAAGGAAAGCAAGA | SEQ ID NO: 6421 |
| rs3131050 | AGTAGGAAGGAATCTATGTCGGACTCA | SEQ ID NO: 1690 | AGTAGGAAGGAATCTATGTCGGACTCG | SEQ ID NO: 4056 | GCTGTTAGTAAGTTGTCTTTAATGG | SEQ ID NO: 6422 |
| rs2523984 | CTAGGGGCCAGCAGTTTAGGAGTA | SEQ ID NO: 1691 | CTAGGGGCCAGCAGTTTAGGAGTG | SEQ ID NO: 4057 | AAGTAAAACAATTTACAGATGTTAGA | SEQ ID NO: 6423 |
| rs3132965 | TGGGGTTGAAAAGAGGAGACCCA | SEQ ID NO: 1692 | TGGGGTTGAAAAGAGGAGACCCG | SEQ ID NO: 4058 | TAAGAGGTGGCTGAAGGAAAT | SEQ ID NO: 6424 |
| rs3115537 | CCTGCCTATTGCCTGCGG | SEQ ID NO: 1693 | CCTGCCAATTGCCTGCGC | SEQ ID NO: 4059 | TTGTGGTCTCTTCCACTTTCT | SEQ ID NO: 6425 |
| rs2647044 | TCATTATCCCCAGTTCAATGACTTTAAT | SEQ ID NO: 1694 | TCATTATCCCCAGTTCAATGACTTTAAC | SEQ ID NO: 4060 | GTAATATGCGTATGTTTTTGTATGT | SEQ ID NO: 6426 |
| rs1419640 | TGGTCAGGATATAAAATGGTACAACTGCT | SEQ ID NO: 1695 | TGGTCAGGATATAAAATGGTACAACTGCG | SEQ ID NO: 4061 | TGGAGAGAGTATAGTCGTTTCTT | SEQ ID NO: 6427 |
| rs8283 | ATTCCTGTGAACCCCCAGTCCT | SEQ ID NO: 1696 | ATTCCTGTGAACCCCCAGTCCC | SEQ ID NO: 4062 | GCTTCTTTGTTTGAGGGGAT | SEQ ID NO: 6428 |
| rs2517810 | CCCGCTCCTGAGTArCTCCCCG | SEQ ID NO: 1697 | CCCGCTCCTGAGTATCTCCCCC | SEQ ID NO: 4063 | TTCTTCAGAGGACTTCCCCT | SEQ ID NO: 6429 |
| rs2394694 | AACCCTGTGATCTTCAATGAGCCT | SEQ ID NO: 1698 | AACCCTGTGATCTTCAATGAGCCC | SEQ ID NO: 4064 | ACAAAAATAAGCAATGGGCA | SEQ ID NO: 6430 |
| rs2076483 | CCTCTCTTTCCCTCCTCCCCACT | SEQ ID NO: 1699 | CCTCTCTTTCCCTCCTCCCCACC | SEQ ID NO: 4065 | CTTCATCACCTCCTCTTCTCC | SEQ ID NO: 6431 |
| rs411337 | ATGGCAGGAAGGGTGGGGGA | SEQ ID NO: 1700 | ATGGCAGGAAGGGTGGGGGG | SEQ ID NO: 4066 | GTCTAGTTGGGCAAAAATTAG | SEQ ID NO: 6432 |
| rs6934993 | CCGGTAAGAATTTAGCAAGTGATGAAAT | SEQ ID NO: 1701 | CCGGTAAGAATTTAGCAAGTGATGAAAC | SEQ ID NO: 4067 | GGATAATGCCTAGTAGGTAATTAA | SEQ ID NO: 6433 |
| rs1245371 | CTTGTCCCTCCCCACCCCCA | SEQ ID NO: 1702 | CTTGTCCCTCCCCACCCCCG | SEQ ID NO: 4068 | ATCCTGCAAAAGAGGTACAAAG | SEQ ID NO: 6434 |
| rs6902723 | CCTCCTCCACTGTTATGTGTAACTATCAA | SEQ ID NO: 1703 | CCTCCTCCACTGTTATGTGTAACTATCAG | SEQ ID NO: 4069 | CTAATAGGAGGAACAAGAAAAAAA | SEQ ID NO: 6435 |
| rs3134942 | CGGGACAAATCCACACCCATT | SEQ ID NO: 1704 | CGGGACAAATCCACACCCATG | SEQ ID NO: 4070 | CCACCACAAACCTGTAGAGG | SEQ ID NO: 6436 |
| rs454212 | GAGCTAGTGGTTTGTCCAAGGCT | SEQ ID NO: 1705 | GAGCAAGTGGTTTGTCCAAGGCC | SEQ ID NO: 4071 | CATGGTTGCAGAGCTAGGAC | SEQ ID NO: 6437 |
| rs1362126 | AGGCGGTGTCTGGGGTTGGA | SEQ ID NO: 1706 | AGGCGGTGTCTGGGGTTGGG | SEQ ID NO: 4072 | GGCTCAGTATTGAGAATTCCC | SEQ ID NO: 6438 |
| rs2075701 | AGCACCTGCAAGAAAAAGGGTGA | SEQ ID NO: 1707 | AGCACCTGOAAGAAAAAGGGTGG | SEQ ID NO: 4073 | CATTGGACACACTGCTGTC | SEQ ID NO: 6439 |
| rs3130502 | CCATATGAGGCTGCCGGCA | SEQ ID NO: 1708 | CCATATGAGGCTGCCGGGG | SEQ ID NO: 4074 | ACAGAGGTGCACAGCTAGTG | SEQ ID NO: 6440 |
| rs1057373 | ACTCATCCTGGAGGCAGCTGCA | SEQ ID NO: 1709 | ACTCATCCTGGAGGCAGCTGCC | SEQ ID NO: 4075 | ACTCTGCAGCTGTGGTTCTC | SEQ ID NO: 6441 |
| rs1736936 | CCAOCACCCTCTCACTCCTGAAT | SEQ ID NO: 1710 | CCACCACCCTCTCACTCCTGAAC | SEQ ID NO: 4076 | GTGGCTCTAGCACTGTTCCAT | SEQ ID NO: 6442 |
| rs7763159 | CCCCAGTCCAAAGTGTTTTCTGCT | SEQ ID NO: 1711 | CCCCAGTCCAAAGTGTTTTCTGCC | SEQ ID NO: 4077 | CTTCACACAGTTATGATACTACTAACA | SEQ ID NO: 6443 |
| rs2517755 | AGGACCCACACCTGCTTTCCTT | SEQ ID NO: 1712 | AGGACCCACACCTGCTTTCCTC | SEQ ID NO: 4078 | TGTTTCCTGATCCTGTCCT | SEQ ID NO: 6444 |
| rs3131000 | ACACAGCAGAGCTGCCTGCAG | SEQ ID NO: 1713 | ACACAGCAGAGOTGCCTGCAC | SEQ ID NO: 4079 | ACTGTGGACGTCACCAAACT | SEQ ID NO: 6445 |
| rs1233364 | GGGAAATGCAACAGAGAATTAAATAAAGT | SEQ ID NO: 1714 | GGGAAATGCAACAGAGAATTAAATAAAGC | SEQ ID NO: 4080 | GTCTAAAAGAATCTGCTTTGTTG | SEQ ID NO: 6446 |
| rs2239804 | GAGCATCAAACTCTGGGGGGAA | SEQ ID NO: 1715 | GAGCATCAAACTCTGGGGGGAG | SEQ ID NO: 4061 | TAAGGCAGAGTACATGGTAATGA | SEQ ID NO: 6447 |
| rs3132668 | GGCAAACAGCACACCAGAACCA | SEQ ID NO: 1716 | GGCAAACAGCACACCAGAACCT | SEQ ID NO: 4082 | GAAGCAAAATCGTTTTTCC | SEQ ID NO: 6448 |
| rs2074464 | ACCTGCTCCTCCCACCTGATCA | SEQ ID NO: 1717 | ACCTGCTCCTCCCACCTGATCG | SEQ ID NO: 4083 | GGTCTCCCTCTTCrATGGC | SEQ ID NO: 6449 |
| rs2857107 | GAAAACAAAGGCCGCAGATTATAAT | SEQ ID NO: 1718 | GAAAACAAAGGCCGCAGARRAAAAC | SEQ ID NO: 4084 | GTCTTTCAAGAATTTTGAAAGTG | SEQ ID NO: 6450 |
| rs1362063 | GAATGTTGTTTAGCCAACTTCTCTGTAT | SEQ ID NO: 1719 | GAATGTTGTTTAGCCAACTTCTCTGTAC | SEQ ID NO: 4085 | AAAATATTTCTTTCACTGCAATTT | SEQ ID NO: 6451 |
| rs1536215 | CCAATCTCTGTTACTCTCACGTAATCCTC | SEQ ID NO: 1720 | CCAATCTCTGTTACTCTCACGTAATCCTG | SEQ ID NO: 4086 | ACATACCAGAAAACCAAGTTATATG | SEQ ID NO: 6452 |
| rs3135395 | TGGTGATGTCAAATGGTGACGAGA | SEQ ID NO: 1721 | TGGTGATGTCAAATGGTGACGAGC | SEQ ID NO: 4087 | ACTATAGCCATGAGAATTCAGTC | SEQ ID NO: 6453 |
| rs3757328 | GGGGCTTCCTCTCCTTCGACTT | SEQ ID NO: 1722 | GGGGCTTCCTCTCCTTCGACTC | SEQ ID NO: 4088 | TGCCAGATAAGTGAGGCTAG | SEQ ID NO: 6454 |
| rs3130982 | CAGCAGCTCCAGTTCCCAATCG | SEQ ID NO: 1723 | CAGCAGCTCCAGTTCCCAATCC | SEQ ID NO: 4089 | GTGGCAAAATCATCCTTCAG | SEQ ID NO: 6455 |
| rs2395269 | GCCATAAATTCTTGCACCTGGGA | SEQ ID NO: 1724 | GCCATAAATTCTTGCACCTGGGC | SEQ ID NO: 4090 | TGCTTCATGCTGGTACCTT | SEQ ID NO: 6456 |
| rs1264423 | TCATATGAGAATGTCTCTGTTCTGTCAA | SEQ ID NO: 1725 | TCATATGAGAATGTCTCTGTTCTGTCAG | SEQ ID NO: 4091 | CCTGATTTTTTTTGTTCTTCTTT | SEQ ID NO: 6457 |
| rs2532929 | GATGGAAACCTGGTCCCAACAT | SEQ ID NO: 1726 | GATGGAAACCTGGTCCCAACAC | SEQ ID NO: 4092 | TAACTCCTAGTCCCCTGGG | SEQ ID NO: 6458 |
| rs805303 | GTTAGGGCTTCACTGGCCACATT | SEQ ID NO: 1727 | GTTAGGGCTTCACTGGCCACATC | SEQ ID NO: 4093 | ACAGGGTTTGGCCTTCATAAT | SEQ ID NO: 6459 |
| rs2260000 | TATCAATCATCCTCCCACCCTCCCT | SEQ ID NO: 1728 | TATCAATCATCCTCCCACCCTCCCC | SEQ ID NO: 4094 | CTATCTCATAGGTCAAAGACTAAGTC | SEQ ID NO: 6460 |
| rs86567 | CATGCACCCAGCACAATGGT | SEQ ID NO: 1729 | CATGCACCCAGCACAATGGG | SEQ ID NO: 4095 | GGCCAGGGAAATAAAAGAAA | SEQ ID NO: 6461 |
| rs3117328 | GATGGACTGTTTCCTGGCTCTATATACA | SEQ ID NO: 1730 | GATGGACTGTTTCCTGGCTCTATATACC | SEQ ID NO: 4096 | ATATCTAACAGTCCCATAGAAGATG | SEQ ID NO: 6462 |
| rs4711203 | TCCAATCACCTCCCATGAGGTT | SEQ ID NO: 1731 | TCCAATCACCTCCCATGAGGTC | SEQ ID NO: 4097 | CTCCTTCAATACTGGGGATTAC | SEQ ID NO: 6463 |
| rs2763982 | AAAATTTTGTTTCTTGTCCCTTTCTTC | SEQ ID NO: 1732 | AAAATTTTGTTTCTTGTCCCTTTCTTG | SEQ ID NO: 4098 | TACTTTTCCTTTCTAGGAATGTAGA | SEQ ID NO: 6464 |
| rs3130349 | AGGGCCAGAGACCAGCTCCA | SEQ ID NO: 1733 | AGGGCCAGAGACCAGCTCCG | SEQ ID NO: 4099 | AGAGCAGAGGGGTGAGTCTT | SEQ ID NO: 6465 |
| rs2021365 | TGTTACCAATGGCAGAATTTCCTTCTT | SEQ ID NO: 1734 | TGTTACCAATGGCAGAATTTCCTTCTC | SEQ ID NO: 4100 | TTAAGGCTGAATAATATTGCATT | SEQ ID NO: 6466 |
| rs3117231 | GCAGCCCTCTGTGACCACAAGT | SEQ ID NO: 1735 | GCAGCCCTCTGTGACCACAAGC | SEQ ID NO: 4101 | CAAGTTGCACTCCCTTCTG | SEQ ID NO: 6467 |
| rs2021719 | CGCCCTCCAGGATCCAATAGGA | SEQ ID NO: 1736 | CGCCCTCCAGGATCCAATAGGG | SEQ ID NO: 4102 | ATAGGTTCAGATGCCTGGGT | SEQ ID NO: 6468 |
| rs5009557 | GCAACCATTGATACTAATTGCTTAGGTT | SEQ ID NO: 1737 | GCAACCATTGATACTAATTGCTTAGGTC | SEQ ID NO: 4103 | GTTAATTTATTGGGGATTGCT | SEQ ID NO: 6469 |
| rs1269556 | TGGGTCTCCTTGTTATCTTCTTTCAT | SEQ ID NO: 1738 | TGGGTCTCCTTGTTATCTTCTTTCAC | SEQ ID NO: 4104 | ATATTATGAAATTTTCTCTCAGAATT | SEQ ID NO: 6470 |
| rs3131785 | GGAAGGTCAATACCTGAGCCGTG | SEQ ID NO: 1739 | GGAAGGTCAATACCTGAGOCGTC | SEQ ID NO: 4105 | CTCACCTAGATGGCTGCAG | SEQ ID NO: 6471 |
| rs362521 | CCTCTGCCTTCTTCACACCCATTAT | SEQ ID NO: 1740 | CCTCTGCCTTCTTCACACCCATTAC | SEQ ID NO: 4106 | TTGTGGGAATGGATGAAAG | SEQ ID NO: 6472 |
| rs644774 | CTGACCTAGGTCTGTCTGCCCCA | SEQ ID NO: 1741 | CTGACCTAGGTCTGTCTGCCCCG | SEQ ID NO: 4107 | CCTCTGCAGTGATCGTGTT | SEQ ID NO: 6473 |
| rs558702 | GCCCCGTGGCTAACAGAGCTA | SEQ ID NO: 1742 | GCCCCGTGGCTAACAGAGCTG | SEQ ID NO: 4108 | TGGTAGCTATTACCCACGC | SEQ ID NO: 6474 |
| rs3132571 | AGTGCTGGAGGCTGACTGGCA | SEQ ID NO: 1743 | AGTGCTGGAGGCTGACTGGCG | SEQ ID NO: 4109 | GTGGAAGCACTCAACTCAGC | SEQ ID NO: 6475 |
| rs6932290 | CGGAGTGCAAGGGTGGAAACT | SEQ ID NO: 1744 | CGGAGTGCAAGGGTGGAAACC | SEQ ID NO: 4110 | GCTTTGGGAAAACTACCGT | SEQ ID NO: 6476 |
| rs429608 | GGTGGAGACGAGCCACTGGA | SEQ ID NO: 1745 | GGTGGAGACGAGCCACTGGG | SEQ ID NO: 4111 | AGTCAATCCTTGGCCTCTTC | SEQ ID NO: 6477 |
| rs2245738 | TGGGGCCCACAAGGAATTATCTT | SEQ ID NO: 1746 | TGGGGCCCACAAGGAATTATCTG | SEQ ID NO: 4112 | TGAGCAATTTGTGAGGGAG | SEQ ID NO: 6478 |
| rs1633034 | ATCAGGTAGTCTGAGGCCGCCT | SEQ ID NO: 1747 | ATCAGGTAGTCTGAGGCCGCCC | SEQ ID NO: 4113 | CTTTGTTCTTTTTGTGTAGGATTG | SEQ ID NO: 6479 |
| rs2524179 | TTTCTTCTGAGTTTTCACTAGCTGCAA | SEQ ID NO: 1748 | TTTCTTCTGAGTTTTCACTAGCTGCAG | SEQ ID NO: 4114 | TTTTCGTCAGAGACTTCATG | SEQ ID NO: 6480 |
| rs7776164 | TGAAAACATCTGACCCTTGAGTTTTA | SEQ ID NO: 1749 | TGAAAACATCTGACCCTTGAGTTTTC | SEQ ID NO: 4115 | TTCTGGGAATATATATTATAGGTTCT | SEQ ID NO: 6481 |
| rs3095226 | GAGTTTTGGTGGGGACATTCA | SEQ ID NO: 1750 | GAGTTTTGGTGGGGACATTCC | SEQ ID NO: 4116 | CTTTAGCACTAGGTATTCTGGTTT | SEQ ID NO: 6482 |
| rs6457044 | CATTGTGAGTCCATTGCTTGCAC | SEQ ID NO: 1751 | CATTGTGAGTCCATTGCTTGCAG | SEQ ID NO: 4117 | TCAGGGTTCAAGATATAGAGTCA | SEQ ID NO: 6483 |
| rs362515 | GAGCCTGGAGCAAGTGCCTAAGT | SEQ ID NO: 1752 | GAGCCTGGAGCAAGTGCCTAAGC | SEQ ID NO: 4118 | CCCAGGAACTAAGAAGAGTAAAA | SEQ ID NO: 6484 |
| rs3131934 | TCCACCATGGTCTCAAAGGCTACA | SEQ ID NO: 1753 | TCCACCATGGTCTCAAAGGCTACG | SEQ ID NO: 4119 | GCATAGTCCTTCCTGAAAAATAT | SEQ ID NO: 6485 |
| rs750332 | CTTGTGTGCTTGCTGGGATCATA | SEQ ID NO: 1754 | CTTGTGTGCTTGCTGGGATCATG | SEQ ID NO: 4120 | CAACCTGCTTACTTTTTCTCTTT | SEQ ID NO: 6486 |
| rs5009448 | CTGCCAAGGCAGGGTGGCT | SEQ ID NO: 1755 | CTGCCAAGGCAGGGTGGCC | SEQ ID NO: 4121 | CAGGCCACCTAAGGGTATAG | SEQ ID NO: 6487 |
| rs2508024 | TTCCTCTAAGGCCCAGTCACCAA | SEQ ID NO: 1756 | TTCCTCTAAGGCCCAGTCACCAG | SEQ ID NO: 4122 | GGTTTGGAAATTTTCACTACATA | SEQ ID NO: 6468 |
| rs3130275 | GGAAAGCTATAGGCTAATCTCACTGACAAA | SEQ ID NO: 1757 | GGAAAGCTATAGGCTAATCTCACTGACAAG | SEQ ID NO: 4123 | ATACCTGGAAAAATCCTAAATAAA | SEQ ID NO: 6489 |
| rs3131115 | GCTTTGGTTGCCACCACTAACTCA | SEQ ID NO: 1758 | GCTTTGGTTGCCACCACTAACTCG | SEQ ID NO: 4124 | CATGTGTAGACAGATGTCTTGAA | SEQ ID NO: 6490 |
| rs1131541 | CAGCCCTATAGCCACCCCAAGA | SEQ ID NO: 1759 | CAGCCCTATAGCCACCCCAAGT | SEQ ID NO: 4125 | TGCTCCATACTCTAACATCTAGC | SEQ ID NO: 6491 |
| rs7452206 | AACCCAAGGGCTATTCCTGCAT | SEQ ID NO: 1760 | AACCCAAGGGCTATTCCTGCAC | SEQ ID NO: 4126 | GAGCTAAGTAAGTAACAAAGGCC | SEQ ID NO: 6492 |
| rs2074470 | TTTGGACTTCGGACACCTCCAT | SEQ ID NO: 1761 | TTTGGACTTCGGACACCTCCAC | SEQ ID NO: 4127 | GTTGGAGAGGAGTAACTTTGTCT | SEQ ID NO: 6493 |
| rs7751953 | ACCCTCAAACCCCAGCTGACTT | SEQ ID NO: 1762 | ACCCTCAAACCCCAGCTGACTG | SEQ ID NO: 4128 | ATGCTTCATGTCTCCAAAATATA | SEQ ID NO: 6494 |
| rs2073148 | TAAGAGGCAAGGATGAGGCTGAGA | SEQ ID NO: 1763 | TAAGAGGCAAGGATGAGGCTGAGG | SEQ ID NO: 4129 | GCACAACCACGAAGATGAC | SEQ ID NO: 6495 |
| rs885910 | GAGGGACTAGGGTGTCCCCAAA | SEQ ID NO: 1764 | GAGGGACTAGGGTGTCCCCAAT | SEQ ID NO: 4130 | AACAGGTTAGATTCTCTCTTTGG | SEQ ID NO: 6496 |
| rs3094179 | CCCCAGGACCCCTGGCAA | SEQ ID NO: 1765 | CCCCAGGACCCCTGGCAG | SEQ ID NO: 4131 | GCTGTCTCATTACTGAGTGTGC | SEQ ID NO: 6497 |
| rs2301277 | AGCGGAGTGTAAGGCCAAGTGAA | SEQ ID NO: 1766 | AGCGGAGTGTAAGGCCAAGTGAG | SEQ ID NO: 4132 | GTAATTTATGTGCTCCTGAAAATT | SEQ ID NO: 6498 |
| rs2239885 | CAGAGGAGGAGCCCAACAGAATA | SEQ ID NO: 1767 | CAGAGGAGGAGCCCAACAGAATC | SEQ ID NO: 4133 | ACCAAACTTAACCAAGAATCAAC | SEQ ID NO: 6499 |
| rs356963 | TTTCACCATGGGTCAGCCCAC | SEQ ID NO: 1768 | TTTCACCATGGGTCAGCCCAG | SEQ ID NO: 4134 | CCTGGTAGGATGAGTGCAT | SEQ ID NO: 6500 |
| rs3132721 | TGGAAAGCAAGCACATATGCA | SEQ ID NO: 1769 | TGGAAAGCAAGCACATATGCG | SEQ ID NO: 4135 | TGAGTGGTCCACTGATATTACAT | SEQ ID NO: 6501 |
| rs928976 | CCAGGGGGAAGAGCAAAGGACT | SEQ ID NO: 1770 | CCAGGGGGAAGAGCAAAGGACC | SEQ ID NO: 4136 | GATCCTGGGAACTGGACAGT | SEQ ID NO: 6502 |
| rs3131784 | CTGTGGGTGCATTTGATGTGACT | SEQ ID NO: 1771 | CTGTGGGTGCATTTGATGTGACC | SEQ ID NO: 4137 | CTTGAATCTCTTCTGTTTTTTCC | SEQ ID NO: 6503 |
| rs3097652 | CACTTCAGTTGCAAAAGTCCTATTTCTTA | SEQ ID NO: 1772 | CACTTCAGTTGGAAAAGTCCTATTTCTTG | SEQ ID NO: 4138 | CTCATTTATTATGTTTCTTATTCCA | SEQ ID NO: 6504 |
| rs805304 | CATTCCGCCCTGCTAAGCCT | SEQ ID NO: 1773 | CATTCCGCCCTGCTAAGCCG | SEQ ID NO: 4139 | GCCCATTACATCCAGACTG | SEQ ID NO: 6505 |
| rs5017401 | TTCTGGGTCCACACGATGTTTTA | SEQ ID NO: 1774 | TTCTGGGTCCACACGATGTTTTC | SEQ ID NO: 4140 | TTTATATTTTCTTGTGTGTGGAAA | SEQ ID NO: 6506 |
| rs130067 | GGAGCGACAGAAGCTTCTGGAA | SEQ ID NO: 1775 | GGAGCGAOAGAAGCTTCTGGAC | SEQ ID NO: 4141 | GAATGTATCTGTGTGCAGACTTAG | SEQ ID NO: 6507 |
| rs2530716 | GGGGAGGGAGGACCCAAAGT | SEQ ID NO: 1776 | GGGGAGGGAGGACCCAAAGC | SEQ ID NO: 4142 | CTGGCCTCCCCTACTCAGTAT | SEQ ID NO: 6508 |
| rs635348 | TCAGCCTTTCCATCTTTGCTGTCC | SEQ ID NO: 1777 | TCAGCCTTTCCATCTTTGCTGTCG | SEQ ID NO: 4143 | AACAGTGCTTGTGGAATAAAAAT | SEQ ID NO: 6509 |
| rs464865 | TAAAAAAGAAAGGCAGGTCCGGA | SEQ ID NO: 1778 | TAAAAAAGAAAGGCAGGTCCGGG | SEQ ID NO: 4144 | GGTTTCTTTTTCTGGATTAGTTT | SEQ ID NO: 6510 |
| rs2844688 | TCATAAAGGCATGAGGTGGGACA | SEQ ID NO: 1779 | TCATAAAGGCATGAGGTGGGACG | SEQ ID NO: 4145 | AAGGAGCTTATGATTTTGTCTGT | SEQ ID NO: 6511 |
| rs1632938 | GCCTCCACTCAGGTCAGAACCA | SEQ ID NO: 1780 | GCCTCCACTCAGGTCAGAACCG | SEQ ID NO: 4146 | AGAGACTAGAACTTTCCAAGGAA | SEQ ID NO: 6512 |
| rs565876 | ACCATAGTAGGAAACCTGGATAGAGACA | SEQ ID NO: 1781 | ACCATAGTAGGAAACCTGGATAGAGACG | SEQ ID NO: 4147 | GGAAATTAGAATCAGGAATGTAGT | SEQ ID NO: 6513 |
| rs6911246 | CTATGGACTGAATTGTGTCCCCCT | SEQ ID NO: 1782 | CTATGGACTGAATTGTGTCCCCCC | SEQ ID NO: 4148 | CAAAATTCATATGTTGAAAATCTAA | SEQ ID NO: 6514 |
| rs3093557 | AGGGAGGGGGTGGGACAGA | SEQ ID NO: 1783 | AGGGAGGGGGTGGGACAGG | SEQ ID NO: 4149 | AGACCATCATCCCTAGGAGC | SEQ ID NO: 6515 |
| rs2516672 | CTTTGGGGTAGCTCCCTCTCAGA | SEQ ID NO: 1784 | CTTTGGGGTAGCTCCCTCTCAGG | SEQ ID NO: 4150 | TGTCCTGCAGGTCCTTACA | SEQ ID NO: 6516 |
| rs3095307 | GAGGCCAGCTGGGGCAAG | SEQ ID NO: 1785 | GAGGCCAGCTGGGGCAAC | SEQ ID NO: 4151 | TGAGGGACTCCATAAAGAGG | SEQ ID NO: 6517 |
| rs3814959 | CGGTTCCTCTCCAAACCTGGTT | SEQ ID NO: 1786 | CGGTTCCTCTCCAAACCTGGTC | SEQ ID NO: 4152 | CCCTTCTCACTGACTAGTGATC | SEQ ID NO: 6518 |
| rs1611493 | GCTGTTAGTCACTAAATTTGGGGGTAGTT | SEQ ID NO: 1787 | GCTGTAAGTCACTAAATTTGGGGGTAGTG | SEQ ID NO: 4153 | TTTACACAGCAACAGATAACTAATG | SEQ ID NO: 6519 |
| rs1233492 | GAATATTCTCCAATCTTGAAAATGGCT | SEQ ID NO: 1788 | GAATATTCTCCAATCTTGAAAATGGCC | SEQ ID NO: 4154 | ATAAGTCTTTAACTCTCTAGAGTTGC | SEQ ID NO: 6520 |
| rs6456890 | GGGGCATCAATAATTAATGCTTATTTATT | SEQ ID NO: 1789 | GGGGCATCAATAATTAATGCTTATTTATC | SEQ ID NO: 4155 | TAACAGACTCGTTGATGTGTATAA | SEQ ID NO: 6521 |
| rs2844680 | AATTCTCAGGGGAAATTTTTTACCCA | SEQ ID NO: 1790 | AATTCTCAGGGGAAATTTTTTACCCC | SEQ ID NO: 4156 | TCCATTATTATAAACTGTGATAATCTT | SEQ ID NO: 6522 |
| rs769177 | GTTACTCATCCCAGAAGCACCCAT | SEQ ID NO: 1791 | GTTACTCATCCCAGAAGCACCCAC | SEQ ID NO: 4157 | GGACCTAAAGTGTGAAAAAAAG | SEQ ID NO: 6523 |
| rs2844659 | GTAGAGGCAGAGGGGGCTGGA | SEQ ID NO: 1792 | GTAGAGGCAGAGGGGGCTGGG | SEQ ID NO: 4158 | TCTTACTCAAAACAGTGAGCTTC | SEQ ID NO: 6524 |
| rs2516698 | AACAGAATCCAAAGGCCGGCA | SEQ ID NO: 1793 | AACAGAATCCAAAGGCCGGCG | SEQ ID NO: 4159 | AACTGTAGGAAATGAGTGCAGTA | SEQ ID NO: 6525 |
| rs204890 | GGCCCCCTCTCGTTTGAGGA | SEQ ID NO: 1794 | GGCCCCCTCTCGTTTGAGGG | SEQ ID NO: 4160 | ATGAGTTGGTCTTCTCCCC | SEQ ID NO: 6526 |
| rs6457699 | TGATTGCCTGTCCAGCTGTTGAA | SEQ ID NO: 1795 | TGATTGCCTGTCCAGCTGTTGAG | SEQ ID NO: 4161 | GGTGGGTGAGAAAATCCAAG | SEQ ID NO: 6527 |
| rs2071787 | ACTGCGCTAAGGAGGCAACTGTC | SEQ ID NO: 1796 | ACTGCGCTAAGGAGGCAACTGTG | SEQ ID NO: 4162 | ACGGCTCTACCAAGATGATTAT | SEQ ID NO: 6528 |
| rs892666 | GGAAAATGGGACCAACGCTAAAAT | SEQ ID NO: 1797 | GGAAAATGGGACCAACGCTAAAAC | SEQ ID NO: 4163 | TCCCTCTCCCTCTTGTGAG | SEQ ID NO: 6529 |
| rs2517894 | GCACTCCTTTCCCACCGTTTTT | SEQ ID NO: 1798 | GCACTCCTTTCCCACCGTTTTC | SEQ ID NO: 4164 | CACCTCTCAATTCTGTTCTCAG | SEQ ID NO: 6530 |
| rs1264348 | CAGTGACAAAACAGGAAGAACAAAAAAA | SEQ ID NO: 1799 | CAGTGACAAAACAGGAAGAACAAAAAAC | SEQ ID NO: 4165 | ACATGTTAATATCTCAAGAAAGTATCC | SEQ ID NO: 6531 |
| rs2394734 | TCTTCATGCTATTTATTACTGTCTGCAA | SEQ ID NO: 1800 | TCTTCATGCTATTTATTACTGTCTGCAG | SEQ ID NO: 4166 | GATCTATTTATGGACTTTTGATGTG | SEQ ID NO: 6532 |
| rs3749950 | GTGAGTGGTGGGCACAGGACAC | SEQ ID NO: 1801 | GTGAGTGGTGGGCACAGGACAG | SEQ ID NO: 4167 | GGCTGATGTTGATGGAGTG | SEQ ID NO: 6533 |
| rs1264350 | CAGGGAAAGCTGAGTCATGATTCTA | SEQ ID NO: 1802 | CAGGGAAAGCTGAGTCATGATTCTG | SEQ ID NO: 4168 | AAAAATTAAGTCAGATGTGCTCA | SEQ ID NO: 6534 |
| rs2517407 | AACCTTTGGAGGAATGGTCAGACTA | SEQ ID NO: 1803 | AACCAAGGAGGAATGGTCAGACTG | SEQ ID NO: 4169 | TTTCCAAAGTGCTGTACCATTT | SEQ ID NO: 6535 |
| rs3117426 | GCAGCTACTGGAATGAATTAGAGTTTAT | SEQ ID NO: 1804 | GCAGCTACTGGAATGAATTAGAGTTTAC | SEQ ID NO: 4170 | TACATAACATATTTGCACATGTACC | SEQ ID NO: 6536 |
| rs3134767 | TTCTGCCAAAATGAAGCCAACATA | SEQ ID NO: 1805 | TTCTGCCAAAATGAAGCCAACATG | SEQ ID NO: 4171 | GATAAGGATATCAAAATGATTACCA | SEQ ID NO: 6537 |
| rs2535238 | GTGACCAGGGCCCTGAACTCT | SEQ ID NO: 1806 | GTGACCAGGGCCCTGAACTCG | SEQ ID NO: 4172 | AAGCAAAATTGTTCTCAATTGT | SEQ ID NO: 6538 |
| rs805282 | AGCACAGTCCCCAGGCCTCAA | SEQ ID NO: 1807 | AGCACAGTCCCCAGGCCTCAC | SEQ ID NO: 4173 | AGGGTTGGGGTTTGTTAAC | SEQ ID NO: 6539 |
| rs401618 | TCCTTCTTGCTGAGTAATGTTCTAGTTTTA | SEQ ID NO: 1808 | TCCTTCTTGCTGAGTAATGTTCTAGTTTTG | SEQ ID NO: 4174 | CCCAGCGTTAATATTTTAAGTCT | SEQ ID NO: 6540 |
| rs550605 | TGTTCTGCTCCTGCAGAGGTCAT | SEQ ID NO: 1809 | TGTTCTGCTCCTGCAGAGGTCAC | SEQ ID NO: 4175 | AGATCTTCAGCCAGGGATC | SEQ ID NO: 6541 |
| rs2021722 | GGCTTACTTTCCCCACGGAGCT | SEQ ID NO: 1810 | GGCTTACTTTCCCCACGGAGCC | SEQ ID NO: 4176 | AGCATCAGTGGTGCTCTGA | SEQ ID NO: 6542 |
| rs885950 | CAGAAAGACGCAGAGGAGGTGGA | SEQ ID NO: 1811 | CAGAAAGACGCAGAGGAGGTGGC | SEQ ID NO: 4177 | AGTGATTTGTGGAGGGGTG | SEQ ID NO: 6543 |
| rs2516489 | CCAAGGGCTCACCATTGACAGT | SEQ ID NO: 1812 | CCAAGGGCTCACCATTGACAGC | SEQ ID NO: 4178 | GTTGACCATGGCTGATAGTATG | SEQ ID NO: 6544 |
| rs2239842 | GAAAATGGGGATGGGGTGAAA | SEQ ID NO: 1813 | GAAAATGGGGATGGGGTGAAG | SEQ ID NO: 4179 | ACAGAGAGAGAATATCCCCTCT | SEQ ID NO: 6545 |
| rs3117235 | CCTTCATGGCCATAGCCACAA | SEQ ID NO: 1814 | CCTTCATGGCCATAGCCACAC | SEQ ID NO: 4180 | GTGAGAGGTTCAAGTGACTGAC | SEQ ID NO: 6546 |
| rs446145 | GCCTACCGAGTGTTGGCCAC | SEQ ID NO: 1815 | GCCTACCGAGTGTTGGCCAG | SEQ ID NO: 4181 | TTGCTCTTATTCTTAGGGAGTTT | SEQ ID NO: 6547 |
| rs2894260 | AGCTCAAGGCTCAGGGCCTTTA | SEQ ID NO: 1816 | AGCTCAAGGCTCAGGGCCTTTG | SEQ ID NO: 4182 | TGACCCCTTCTTCCAAATATAC | SEQ ID NO: 6548 |
| rs2143468 | CACAATATTCAGTATTTTGGCAGGATAA | SEQ ID NO: 1817 | CACAATATTCAGTATTTTGGCAGGATAT | SEQ ID NO: 4183 | TACATCGTAAGTTTTTTTATCTTC | SEQ ID NO: 6549 |
| rs3873260 | TTGAGTGCTATTTCTTTGTGGCATCA | SEQ ID NO: 1818 | TTGAGTGCTATTTCTTTGTGGCATCG | SEQ ID NO: 4184 | GACAAATTTACAATAATACATTTCCT | SEQ ID NO: 6550 |
| rs1050391 | CAGGCAAGGACTGCAGCTAGACA | SEQ ID NO: 1819 | CAGGCAAGGACTGCAGCTAGACG | SEQ ID NO: 4185 | AGAAGCAGAGCCAGATCCAG | SEQ ID NO: 6551 |
| rs3094001 | GGGCAGGATCTGGATGGGACA | SEQ ID NO: 1820 | GGGCAGGATCTGGATGGGACG | SEQ ID NO: 4186 | CTCTGACAACACCTCACCTAGT | SEQ ID NO: 6552 |
| rs715044 | GCTTACAGCTCAGGAATCCACCAAT | SEQ ID NO: 1821 | GCTTACAGCTCAGGAATCCACCAAG | SEQ ID NO: 4187 | TACAGATAAATACTTGGGATTCATC | SEQ ID NO: 6553 |
| rs1810640 | ACCAGGTGTGCCCTCATATGCTT | SEQ ID NO: 1822 | ACCAGGTGTGCCCTCATATGCTC | SEQ ID NO: 4188 | ATTCCAGAAGCTTCACAAGAC | SEQ ID NO: 6554 |
| rs887468 | TGACATTGCACTGTAATAATAAAGGTGTA | SEQ ID NO: 1823 | TGACATTGCACTGTAATAATAAAGGTGTG | SEQ ID NO: 4189 | GTGAAGTATCTTTTTATGGTGACTT | SEQ ID NO: 6555 |
| rs755714 | AACCTCATCCCACCTTGGCAAT | SEQ ID NO: 1824 | AACCTCATCCCACCTTGGCAAC | SEQ ID NO: 4190 | CTAAACCAAGGCCATCTACATT | SEQ ID NO: 6556 |
| rs1265777 | CCTTCAGGACTCACATCTTAGTCACAG | SEQ ID NO: 1825 | CCTTCAGGACTCACATCTTAGTCACAC | SEQ ID NO: 4191 | TAGAAGAAGTTAATGACTTATGTCTT | SEQ ID NO: 6557 |
| rs999265 | AGGATAGCCCTGCTAGGCAAGGA | SEQ ID NO: 1826 | AGGATAGCCCTGCTAGGCAAGGG | SEQ ID NO: 4192 | CAGTTAAAAAAAGTATAAATAAATTGA | SEQ ID NO: 6558 |
| rs2021729 | AGCCTCCCTTTCCCAGGCTTATT | SEQ ID NO: 1827 | AGCCTCCCTTTCCCAGGCTTATC | SEQ ID NO: 4193 | TCATCCAGCAGCTCCTTCT | SEQ ID NO: 6559 |
| rs7452076 | AAATAGCTCAGAGAATGCCAATGGT | SEQ ID NO: 1828 | AAATAGCTCAGAGAATGCCAATGGC | SEQ ID NO: 4194 | GAGGAAGGAAGGATGAGTAGAT | SEQ ID NO: 6560 |
| rs743399 | CCTCCCCCCACCAAGGAT | SEQ ID NO: 1829 | CCTCCCCCCACCAAGGAC | SEQ ID NO: 4195 | CAGTAAACCCACCACTCCAG | SEQ ID NO: 6561 |
| rs2256594 | GGGCGACTTTTCCCCCTTTAAAA | SEQ ID NO: 1830 | GGGCGACTTTTCCCCCTTAAAG | SEQ ID NO: 4196 | GTCTTGCAGCAATTTTTTTCT | SEQ ID NO: 6562 |
| rs1046080 | CATCAGCCCCAACACCAGAGAA | SEQ ID NO: 1831 | CATCAGCCCCAACACCAGAGAC | SEQ ID NO: 4197 | GAACCTGAAGAGCCAGCAC | SEQ ID NO: 6563 |
| rs2523807 | GTTTTTTTCAAAAACTGGCTATTTGAT | SEQ ID NO: 1832 | GTTTTTTTCAAAAACTGGCTATTTGAC | SEQ ID NO: 4198 | GGCATTCTATAATAAACTTAACATCT | SEQ ID NO: 6564 |
| rs3094647 | GCAGTGTCGACCTCCTGGGT | SEQ ID NO: 1833 | GCAGTGTCGACCTCCTGGGG | SEQ ID NO: 4199 | CAAGGGACCCACTGATCTC | SEQ ID NO: 6565 |
| rs421446 | GACGCACGAACCCCTCCCTT | SEQ ID NO: 1834 | GACGCACGAACCCCTCCCTC | SEQ ID NO: 4200 | AAAAAGACCCGGAGTGTCAC | SEQ ID NO: 6566 |
| rs6415110 | GCAACTGCTATACTACAGTAGTCAACCTGA | SEQ ID NO: 1835 | GCAACTGCTATACTACAGTAGTCAACCTGG | SEQ ID NO: 4201 | AACTGAGATGGCTAGCTACTAAG | SEQ ID NO: 6567 |
| rs2285805 | ACCCAGGGTCCTCGCCCCG | SEQ ID NO: 1836 | ACCCAGGGTCCTCGCCCCC | SEQ ID NO: 4202 | CATCCTTTGCTTTTCTCTCC | SEQ ID NO: 6568 |
| rs2242955 | CATAGCACAGGGAGGGTTTCCCT | SEQ ID NO: 1837 | CATAGCACAGGGAGGGTTTCCCC | SEQ ID NO: 4203 | GAGGCAACTCTAGCAGAATTG | SEQ ID NO: 6569 |
| rs29233 | GGCAGAATCACTCTCCAAAAAGACTTACG | SEQ ID NO: 1838 | GGCAGAATCACTCTCCAAAAAGACTTACC | SEQ ID NO: 4204 | GTGTTTATCTGAATATTTTCTTTTAGC | SEQ ID NO: 6570 |
| rs4711312 | AAGACGAGGCAAAGACACCTAGAAT | SEQ ID NO: 1839 | AAGACGAGGCAAAGACACCTAGAAC | SEQ ID NO: 4205 | CAAACTACAGACTGAATTTCTTTC | SEQ ID NO: 6571 |
| rs1264327 | CTGCCAGGCAAGCTACAGCCT | SEQ ID NO: 1840 | CTGCCAGGCAAGCTACAGCCC | SEQ ID NO: 4206 | TCATACCCTGGTGGGACAT | SEQ ID NO: 6572 |
| rs2261033 | TGCAACGTAGAAAGGCTTGATTATAAAT | SEQ ID NO: 1841 | TGCAAGGTAGAAAGGCTTGATTATAAAC | SEQ ID NO: 4207 | CATACCAGGCAGAAAAAAATTAT | SEQ ID NO: 6573 |
| rs805288 | CAAAGGGCTAGGCTCACACCCT | SEQ ID NO: 1842 | CAAAGGGCTAGGCTCACACCCC | SEQ ID NO: 4208 | CCTCTGTACCCCACCTCCT | SEQ ID NO: 6574 |
| rs3106189 | CGCGGTAAGGCTGGGGTA | SEQ ID NO: 1843 | CGCGGTAAGGCTGGGGTG | SEQ ID NO: 4209 | CCTGGTGAGAACTGGAGAG | SEQ ID NO: 6575 |
| rs2157338 | CCCAATATGCAATTAACAAAGAAGATAACA | SEQ ID NO: 1844 | CCCAATATGCAATTAACAAAGAAGATAACG | SEQ ID NO: 4210 | TAGAGAGTAATAGTGCACTGAAGAA | SEQ ID NO: 6576 |
| rs805299 | TCCCTGCCCCAATACCTAAAAAGTA | SEQ ID NO: 1845 | TCCCTGCCCCAATACCTAAAAAGTT | SEQ ID NO: 4211 | ACACACACATTCACACCTGTC | SEQ ID NO: 6577 |
| rs2074505 | CCCCGCACCCCACAGGAT | SEQ ID NO: 1846 | CCCCGCACCCCACAGGAC | SEQ ID NO: 4212 | CTAGTAGTGGTGAGTGGGCAAT | SEQ ID NO: 6578 |
| rs1042338 | CTGCCTCGGGAGTTCTGACCA | SEQ ID NO: 1847 | CTGCCTCGGGAGTTCTGACCG | SEQ ID NO: 4213 | GTGTTAAGCCTCTGTCTCTGG | SEQ ID NO: 6579 |
| rs1059510 | CGCACAGATTTTCCGAGTGAAT | SEQ ID NO: 1848 | CGCACAGATTTTCCGAGTGAAC | SEQ ID NO: 4214 | CTACTACAATCAGAGCGAGGC | SEQ ID NO: 6580 |
| rs4678 | GGAGGCTCATCCATCAGCTGCT | SEQ ID NO: 1849 | GGAGGCTCATCCATCAGCTGCC | SEQ ID NO: 4215 | CTTGTCCAGTTTTGACAATTC | SEQ ID NO: 6581 |
| rs396090 | CCTCCCATCCTCCAAAACTTCCTT | SEQ ID NO: 1850 | CCTCCCATCCTCCAAAACTTCCTC | SEQ ID NO: 4216 | AGTGAATCCTTCCACCACTC | SEQ ID NO: 6582 |
| rs1233419 | TTGTTGGAAAATTGCAAGTTGTATGA | SEQ ID NO: 1851 | TTGTTGGAAAATTGCAAGTTGTATGG | SEQ ID NO: 4217 | AATGCCAACCTAGAATTCTTTAC | SEQ ID NO: 6583 |
| rs1265063 | CACCTTCCTCAGAGCCCACCTTT | SEQ ID NO: 1852 | CACCTTCCTCAGAGCCCACCTTC | SEQ ID NO: 4218 | CCATCACCAAGCACACTC | SEQ ID NO: 6584 |
| rs3117223 | AGTGCTGAACATCACGTGGCTGT | SEQ ID NO: 1853 | AGTGCTGAACATCACGTGGCTGC | SEQ ID NO: 4219 | AGTCATTGAGGGTATTGCAGA | SEQ ID NO: 6585 |
| rs2269475 | GCCCCCGCAAATCACCCA | SEQ ID NO: 1854 | GCCCCCGCAAATCACCCG | SEQ ID NO: 4220 | TTCTCACCAATATCGCCATT | SEQ ID NO: 6586 |
| rs2235499 | AGTCCCTGCCTGTGTCCCCCA | SEQ ID NO: 1855 | AGTCCCTGCCTGTGTCCCCCC | SEQ ID NO: 4221 | CTCTTGACTGTCCCCCACTT | SEQ ID NO: 6587 |
| rs6457020 | TACTTGGATATAACACCAAAGATACAAA | SEQ ID NO: 1856 | TTTCTTGGATATAACACCAAAGATACAAC | SEQ ID NO: 4222 | ACAAAGAAAAAATTGATAAATGG | SEQ ID NO: 6588 |
| rs185819 | GTCACCCACAGGTTTCCCAGGT | SEQ ID NO: 1857 | GTCACCCACAGGTTTCCCAGGC | SEQ ID NO: 4223 | GTCACTCTGAGGCACTAGGAA | SEQ ID NO: 6589 |
| rs2273611 | GGGGGCCACAGGAAAGGCT | SEQ ID NO: 1858 | GGGGGCCACAGGAAAGGCC | SEQ ID NO: 4224 | GATGGATGGAGGTAGGGAG | SEQ ID NO: 6590 |
| rs1632879 | GGCTGGGTTGCTGGATGATTCT | SEQ ID NO: 1859 | GGCTGGGTTGCTGGATGATTCC | SEQ ID NO: 4225 | CTCACACAACGGACTAGG | SEQ ID NO: 6591 |
| rs3093551 | CCTCCCTGGGCCTCAGTTTCT | SEQ ID NO: 1860 | CCTCCCTGGGCCTCAGTTTCC | SEQ ID NO: 4226 | TCTCTGCTGAGCCAGAAGAT | SEQ ID NO: 6592 |
| rs130072 | GCCTTGGCATGCTCCCTCT | SEQ ID NO: 1881 | GCCTTGGCATGCTCCCTCC | SEQ ID NO: 4227 | CTCCTCTCTGTGTCTGAGAGTT | SEQ ID NO: 6593 |
| rs2295667 | CCTCCCAGCCACAGCTCGT | SEQ ID NO: 1862 | CCTCCCAGCCACAGCTCGG | SEQ ID NO: 4228 | TATCCCAAGCTGGGTAATGT | SEQ ID NO: 6594 |
| rs2517466 | CCCTGCCGCTTTCTGTGACT | SEQ ID NO: 1863 | CGCTGCCGCTTTCTGTGACC | SEQ ID NO: 4229 | CAGTGTTCCCCAAACCTTGT | SEQ ID NO: 6595 |
| rs28T724 | TTCAAAATAGTTGACAGCTGGTATGGT | SEQ ID NO: 1864 | TTCAAAATAGTTGACAGCTGGTATGGC | SEQ ID NO: 4230 | AAATAAAATTTTCCCAATTATGC | SEQ ID NO: 6596 |
| rs7769073 | GTGGGCACTGGGGGGAAGT | SEQ ID NO: 1865 | GTGGGCACTGGGGGGAAGA | SEQ ID NO: 4231 | GGGAGGGTGATATCAGCAC | SEQ ID NO: 6597 |
| rs3130780 | CCATAAAGAAGCTCTGTCAATTTTTAGCTT | SEQ ID NO: 1866 | CCATAAAGAAGCTCTGTCAATTTTTAGCTG | SEQ ID NO: 4232 | TCTTTGAAGATTTTTAAAACATTAATT | SEQ ID NO: 6598 |
| rs4713354 | GAGGAAAGGCGCTCTGGCCT | SEQ ID NO: 1867 | GAGGAAAGGCGCTCTGGCCG | SEQ ID NO: 4233 | GTCTATGACACAGCCCCTCTAT | SEQ ID NO: 6599 |
| rs2021720 | CTCCTGGTGGGCGACCGTG | SEQ ID NO: 1868 | CTCCTGGTGGGCGACCGTC | SEQ ID NO: 4234 | GACCAGAAATTAGATTTGAGTC | SEQ ID NO: 6600 |
| rs6456879 | TCAGTGAGCACATTTACTTCCAAGAGTT | SEQ ID NO: 1869 | TCAGTGAGCACATTTACTTCCAAGAGTA | SEQ ID NO: 4235 | ATCAATCACTTCCTAATATTAATAAA | SEQ ID NO: 6601 |
| rs6913528 | CAAAGCCGGTTTTGCTCACTGTT | SEQ ID NO: 1870 | CAAAGCCGGTTTTGCTCACTGTC | SEQ ID NO: 4236 | CTTGTTAGCACCCACTGAAT | SEQ ID NO: 6602 |
| rs6929434 | CCTCTTGGTAAAGTCAGCTGTAGGAGT | SEQ ID NO: 1871 | CCTCTTGGTAAAGTCAGCTGTAGGAGA | SEQ ID NO: 4237 | ATAGTAGCCAACATTCATCTAGTG | SEQ ID NO: 6603 |
| rs207T99 | GCGGGGTCTGGGTTTTCTTGTT | SEQ ID NO: 1872 | GCGGGGTCTGGGTTTTCTTGTC | SEQ ID NO: 4238 | CACTGGGAGTCAAGCC | SEQ ID NO: 6604 |
| rs518374 | AAATAGAAAAACAATCAATTGGGAAAAA | SEQ ID NO: 1873 | AAATAGAAAAACAATCAATTGGGAAAAC | SEQ ID NO: 4239 | GTGTTTGAAAGAGTATATCAATAAGA | SEQ ID NO: 6605 |
| rs446735 | GGTCATCCCAAGGGCTTTCCAA | SEQ ID NO: 1874 | GGTCATCCCAAGGGCTTCCAC | SEQ ID NO: 4240 | CAGTTCCTGAGCTCCATG | SEQ ID NO: 6606 |
| rs2075799 | CTGTCCCTGGGGCTGGAGACA | SEQ ID NO: 1575 | CTGTCCCTGGGGCTGGAGACG | SEQ ID NO: 4241 | GTGATGACTGCCCTGATAAAG | SEQ ID NO: 6607 |
| rs7757012 | GGGAGGCCTACCTGGGGCT | SEQ ID NO: 1676 | GGGAGGCCTACCTGGGGCC | SEQ ID NO: 4242 | CTGCAGTCCAAGTACGCTG | SEQ ID NO: 6608 |
| rs3093984 | CTGGATGTGCTCGAAGGTCCAT | SEQ ID NO: 1877 | CTGGATGTGCTCGAAGGTCCAC | SEQ ID NO: 4243 | GAGGGTTCATGTCTAGGTCC | SEQ ID NO: 6609 |
| rs805258 | GGAAAGAGATCCAGCCTGGCTT | SEQ ID NO: 1878 | GGAAAGAGATCCAGCCTGGCTC | SEQ ID NO: 4244 | CCTAAGTCAGCCTCTTCACC | SEQ ID NO: 6610 |
| rs2071351 | GCCACTCCAGGTAAGAGCCGAA | SEQ ID NO: 1879 | GCCACTCCAGGTAAGAGCCGAG | SEQ ID NO: 4245 | CTCAGGGAACAATTCCTAGG | SEQ ID NO: 6611 |
| rs6938130 | TGATAGATTAAATGTTTCTAGGAATTTGCT | SEQ ID NO: 1880 | TGATAGATTAAATGTTTCTAGGAATTTGCA | SEQ ID NO: 4246 | ATCTCACCTAGGTTTTCAAATTT | SEQ ID NO: 6612 |
| rs3130388 | TGGAAATATTCGATTGCTTAGAGTGACA | SEQ ID NO: 1881 | TGGAAATATTCGATTGCTTAGAGTGACC | SEQ ID NO: 4247 | ATGATTACATAACATCCTTTATTATC | SEQ ID NO: 6613 |
| rs1061815 | GGACATGGGGGTGGGGTGG | SEQ ID NO: 1882 | GGACATGGGGGTGGGGTGC | SEQ ID NO: 4248 | CTCCCCACCTCCTCACATTAT | SEQ ID NO: 6614 |
| rs241455 | TGAAAAACACTTAGCATAGCTCCTACTCA | SEQ ID NO: 1883 | TGAAAAACACTTAGCATAGCTCCTACTCC | SEQ ID NO: 4249 | ATTAAAACTCTATAAATGGTAGCTGT | SEQ ID NO: 6615 |
| rs3891288 | TCCATATTGTAATAATTGGCAGGATCA | SEQ ID NO: 1884 | TCCATATTGTAATAATTGGCAGGATCT | SEQ ID NO: 4250 | CTTCTTTTAAAGGTTAAATAATATTCA | SEQ ID NO: 6616 |
| rs1655938 | ACCTGGAGAACGGGAAGGAGAT | SEQ ID NO: 1885 | ACCTGGAGAACGGGAAGGAGAC | SEQ ID NO: 4251 | GGTACCAGGGAACACAAGAC | SEQ ID NO: 6617 |
| rs3131102 | CGCTTCCAGCGAGTGACAAGA | SEQ ID NO: 1886 | CGCTTCCAGCGAGTGACAAGG | SEQ ID NO: 4252 | AGCTGTTTCCTCTTGGAAAG | SEQ ID NO: 6616 |
| rs6457566 | CCAAGCGAAAAATTATGTATCATCTATACA | SEQ ID NO: 1887 | CCAAGCGAAAAATTATGTATCATCTATACG | SEQ ID NO: 4253 | ACATGTCAATTTTATTGTTAGAGC | SEQ ID NO: 6619 |
| rs204887 | CGCCCCTCGTGGAGGCCA | SEQ ID NO: 1888 | CGCCCCTCGTGGAGGCCG | SEQ ID NO: 4254 | ACAGGTGCATCTTGTATTTGC | SEQ ID NO: 6620 |
| rs2844725 | TCTTTCTTTTCGAAGCGCAGTACA | SEQ ID NO: 1889 | TCTTTCTTTTCGAAGCGCAGTTTCG | SEQ ID NO: 4255 | TCTTCTTGCTCAGGCTGG | SEQ ID NO: 6621 |
| rs2074491 | GGGTGGGTGACTGGGGACTTT | SEQ ID NO: 1890 | GGGTGGGTGACTGGGGACTTC | SEQ ID NO: 4256 | GCTGATTGGCTTCTCTAGAA | SEQ ID NO: 6622 |
| rs1233425 | CAGGCTGGAGCAGAGAGCCATC | SEQ ID NO: 1891 | CAGGCTGGAGCAGAGAGCCATG | SEQ ID NO: 4257 | CTCTCAGGTCATCACACACC | SEQ ID NO: 6623 |
| rs4569 | TTCTACTTTATTTCATATTCCCACCACA | SEQ ID NO: 1892 | TTCTACTTTATTTCATATTCCCACCACG | SEQ ID NO: 4258 | TAACGACTCCTTTAATTTAAACTAAA | SEQ ID NO: 6624 |
| rs2072109 | AAAGCCTCTCTGGCGGCATCG | SEQ ID NO: 1893 | AAAGCCTCTCTGGCGGCATCC | SEQ ID NO: 4259 | GGGGTATCAGAGGAAGGTAG | SEQ ID NO: 6625 |
| rs3130216 | GTGTGGGGCTATTGCACTTAGAATA | SEQ ID NO: 1894 | GTGTGGGGCTATTGCACTTAGAATG | SEQ ID NO: 4260 | GGAAAAATAATATGTAAACATTTTTG | SEQ ID NO: 6626 |
| rs3757340 | TCAGTAATAAGGTGAAATGGCCATAA | SEQ ID NO: 1895 | TCAGTAATAAGGTGAAATGGCCATAG | SEQ ID NO: 4261 | GAGAGAGAAAATCCAGAAAACAC | SEQ ID NO: 6627 |
| rs3116838 | AATTGAAGCTAAACATTTTTTCTTTAGGT | SEQ ID NO: 1896 | AATTGAAGCTAAACATTTTTTCTTTAGGC | SEQ ID NO: 4262 | AACATTTTGAAATGACTAAATTCA | SEQ ID NO: 6628 |
| rs7451419 | GGTCAATGGCCTGCCAGCA | SEQ ID NO: 1897 | GGTCAATGGCCTGCCAGCG | SEQ ID NO: 4263 | CTGTTGGCATGATCTTTAACC | SEQ ID NO: 6629 |
| rs1475865 | AGTTTGCCATCCACCGCCTA | SEQ ID NO: 1898 | AGTGCCATCCACCGCCTG | SEQ ID NO: 4264 | CCCAGGACATCATCATCTAC | SEQ ID NO: 6630 |
| rs1264315 | CACCTCAGGCAGACCAGGCA | SEQ ID NO: 1899 | CACCTCAGGCAGACCAGGCG | SEQ ID NO: 4265 | GTACATGTAAATCCCCTCCC | SEQ ID NO: 6631 |
| rs2269610 | GCCCTTCAAGTGGTGTGGGC | SEQ ID NO: 1900 | GCCCTTCAAGTGGTGTGGGG | SEQ ID NO: 4266 | ACCTTAAGTTGCCACCTTCT | SEQ ID NO: 6632 |
| rs3129012 | CTGGTGCAGGCCTGGGGCA | SEQ ID NO: 1901 | CTGGTGCAGGCCTGGGGGG | SEQ ID NO: 4267 | AGTACTTTAGCTTGTCTAGATT | SEQ ID NO: 6633 |
| rs3132935 | AACAGGATACAGGAGGAGGACTTAAGTA | SEQ ID NO: 1902 | AACAGGATACAGGAGGAGGACTTAAGTG | SEQ ID NO: 4268 | AATATTGAAATTCTTGGGTTAGG | SEQ ID NO: 6634 |
| rs2074473 | GACTGTGAGCCTGGGGTGCTA | SEQ ID NO: 1903 | GACTGTGAGCCTGGGGTGCTG | SEQ ID NO: 4269 | GCAAGGTCTACTGGGAAGTG | SEQ ID NO: 6635 |
| rs3130553 | GTGGGAAAGAGGAGTCGCT | SEQ ID NO: 1904 | GTGGGAAAGAGGAGTCGCC | SEQ ID NO: 4270 | CCACTGGAGAAGAGAGAGAAAG | SEQ ID NO: 6636 |
| rs2534672 | GCTTCACCAAGCCCCTTTCGC | SEQ ID NO: 1905 | GCTTCACCAAGCCCCTTTCGG | SEQ ID NO: 4271 | CTCTCACTGGCTTGTTCCTT | SEQ ID NO: 6637 |
| rs1573294 | GTTTTTGTGCCGAGCCCCCA | SEQ ID NO: 1906 | GTTTTTGTGCCGAGCCCCCG | SEQ ID NO: 4272 | GCTTCTTGATGGGCTCTG | SEQ ID NO: 6638 |
| rs7773534 | TGGGTATGAAAATGCAGTTAGATAGAAT | SEQ ID NO: 1907 | TGGGTATGAAAATGCAGTTAGATAGAAC | SEQ ID NO: 4273 | AAGAACTTCTAGTATTCAACAGTAAA | SEQ ID NO: 6639 |
| rs1737079 | TGTTCTACACTTAGAGTCAAAGCAAATTAT | SEQ ID NO: 1908 | TGTTCTACACTTAGAGTCAAAGCAAATTAC | SEQ ID NO: 4274 | TAACTGTAAGATGTTCAAAGATGAA | SEQ ID NO: 6640 |
| rs805297 | AGCAAAGACTTGCACATGGTAAT | SEQ ID NO: 1909 | AGCAAAGACTTGCACATGGTAAG | SEQ ID NO: 4275 | ATTAATAGTAATGTTTGCAAAGCA | SEQ ID NO: 6641 |
| rs805298 | CGGGGGTGGAGGCATTACCT | SEQ ID NO: 1910 | CGGGGGTGGAGGCATTACCG | SEQ ID NO: 4276 | GTGCCCTCTTCTCTTAACCTG | SEQ ID NO: 6642 |
| rs3749951 | AGTCCCCCACTCCCCCAGCTG | SEQ ID NO: 1911 | AGTCCCCCACTCCCCCAGCTC | SEQ ID NO: 4277 | CTTCTTGGCCTCTTCCAG | SEQ ID NO: 6643 |
| rs3094208 | GGAGGGGGCACTGGGGTAA | SEQ ID NO: 1912 | GGAGGGGGCACTGGGGTAG | SEQ ID NO: 4278 | GGAGGAGTGGACTAGAAGGTG | SEQ ID NO: 6644 |
| rs805263 | CTCCCCAGTTTCTGGGACACCT | SEQ ID NO: 1913 | CTCCCCAGTTTCTGGGACACCG | SEQ ID NO: 4279 | CTTGGTGAGTGAAACTTGGG | SEQ ID NO: 6645 |
| rs3135330 | AAAAGTACAAGCGGCCCCGTT | SEQ ID NO: 1914 | AAAAGTACAAGCGGCCCCGTC | SEQ ID NO: 4280 | CAATGACACAGCAACTTTGC | SEQ ID NO: 6646 |
| rs734181 | CACCGTCCCACCCACACCG | SEQ ID NO: 1915 | CACCGTCCCACCCACAGCC | SEQ ID NO: 4281 | GTGTCAGAAACTGGAGCCATA | SEQ ID NO: 6647 |
| rs1050673 | TTCCCCAAGTTAGACAGGAAGAGATA | SEQ ID NO: 1916 | TTCCCCAAGTTAGACAGGAAGAGATG | SEQ ID NO: 4282 | GAAGGCTAGTGCTTGGAGAG | SEQ ID NO: 6648 |
| rs3129948 | GAAAACTGGAAGGTTAGGTAAAACTGTGT | SEQ ID NO: 1917 | GAAAACTGGAAGGTTAGGTATAACTGTGG | SEQ ID NO: 4283 | ACACGATGTGTAAGTCCTAGAAG | SEQ ID NO: 6649 |
| rs2517436 | AAAAAATGATAAGTATGCAAGGCAATAGA | SEQ ID NO: 1918 | AAAAAATGATAAGTATGCAAGGCAATAGG | SEQ ID NO: 4264 | ATGTTAATTTGATTTAATAATTTCAA | SEQ ID NO: 6650 |
| rs2242664 | GTTGGTCCATGGAAAGCAGCGT | SEQ ID NO: 1919 | GTTGGTCCATGGAAAGCAGCGC | SEQ ID NO: 4285 | CCAGAGCTGGAAGGGAGAG | SEQ ID NO: 6651 |
| rs7761801 | ATTGGTGCAGACACCCTGCTTT | SEQ ID NO: 1920 | ATTGGTGCAGACACCCTGCTTC | SEQ ID NO: 4286 | AACCAGTGATGGGTGACAA | SEQ ID NO: 6652 |
| rs2077022 | CCGAGATCACGTCACTGCACTCTAC | SEQ ID NO: 1921 | CCGAGATCACGTCACTGCACTCTAG | SEQ ID NO: 4287 | ATGCCGTGTCAAAAAAAATAA | SEQ ID NO: 6653 |
| rs7743662 | ATGCCAGGGTTGCAGTGAGCTAGT | SEQ ID NO: 1922 | ATGCCAGGGTTGCAGTGAGCTAGC | SEQ ID NO: 4288 | TATAGATGTCTGATGATAGTTGGG | SEQ ID NO: 6654 |
| rs1264319 | GTGGGAATCCGCCCCACTCT | SEQ ID NO: 1923 | GTGGGAATCCGCCCCACTCC | SEQ ID NO: 4269 | AATGGCTCTGGTAAGACCTG | SEQ ID NO: 6655 |
| rs204990 | CAATCTTCCTACCTCAGCCTCTCATTT | SEQ ID NO: 1924 | CAATCTTCCTACCTCAGCCTCTCATTG | SEQ ID NO: 4290 | TCCATATCTATATCTCTTATGCCC | SEQ ID NO: 6656 |
| rs2736158 | CTTCCAGCCTCCGCTCCTGG | SEQ ID NO: 1925 | CTTCCAGCCTCCGCTCCTGC | SEQ ID NO: 4291 | CCTCACAACAGTCACAGTGG | SEQ ID NO: 6657 |
| rs13409 | GATAAGTGTGTCTATCTACTGTGTCCCAA | SEQ ID NO: 1926 | GATAAGTGTGTCTATCTACTGTGTCCCAG | SEQ ID NO: 4292 | CTTCTTTATTTAAGAAAAAAGTGAT | SEQ ID NO: 6658 |
| rs3130057 | GGGGGACATTAAATTTTTTAAATTAGGTGA | SEQ ID NO: 1927 | GGGGGACATAAAATTTTTAAATTAGGTGC | SEQ ID NO: 4293 | CTCTAAAGTTAGTTTTAGTTTGGA | SEQ ID NO: 6659 |
| rs2857127 | GCTTCTTGGTGTTCTCAACAATTTTAT | SEQ ID NO: 1928 | GCTTCTTGGTGTTCTCAACAATTTTAC | SEQ ID NO: 4294 | CAAAAGAATTATAAGCTACTGATGT | SEQ ID NO: 6660 |
| rs7887 | AGGCTCCAGGGAGTCGGGGT | SEQ ID NO: 1929 | AGGCTCCAGGGAGTCGGGGG | SEQ ID NO: 4295 | GTTTCTTCACTACGAGGGGT | SEQ ID NO: 6661 |
| rs2535277 | CCTCAGTGTCTTCCCTGTGCAGTA | SEQ ID NO: 1930 | CCTCAGTGTCTTCCCTGTGCAGTG | SEQ ID NO: 4296 | GGGGTTGTTGTGAGGATTT | SEQ ID NO: 6662 |
| rs2395296 | TCTTCTTATACAGCTGTTACACATGCACA | SEQ ID NO: 1931 | TCTTCTTATACAGCTGTTACACATGCACG | SEQ ID NO: 4297 | CATACACACTCTCTTGAGCATG | SEQ ID NO: 6663 |
| rs2294583 | TGTCTCTAAGATTGTTTCTTAGCTGTAAA | SEQ ID NO: 1932 | TGTCTCTAAGATTGTTTCTTAGCTGTAAT | SEQ ID NO: 4298 | TGAGGATAAAGCAATTAAACTTT | SEQ ID NO: 6664 |
| rs3129681 | GGAAGTACAGAAACCTATAGAAGGGTATCA | SEQ ID NO: 1933 | GGAAGTACAGAAACCTATAGAAGGGTATCG | SEQ ID NO: 4299 | AATAGGGTCTAACTTAATTTGAGAT | SEQ ID NO: 6665 |
| rs3130141 | CCAAGAGGACGCAGCACTGGA | SEQ ID NO: 1934 | CCAAGAGGACGCAGCACTGGC | SEQ ID NO: 4300 | GCTTCAGGAGGTGGCTGT | SEQ ID NO: 6666 |
| rs2285042 | GCACGGATGTCTGCCTCCTGT | SEQ ID NO: 1935 | GCACGGATGTCTGCCTCCTGC | SEQ ID NO: 4301 | AGTGTGTGCCCCAGTTTAC | SEQ ID NO: 6667 |
| rs5027663 | TTCTCCATGTCCTTGGCTATATTTGT | SEQ ID NO: 1936 | TTCTCCATGTCCTTGGCTATATTTGA | SEQ ID NO: 4302 | ATTCCAGACTTAAACTTAAGATATA | SEQ ID NO: 6668 |
| rs2294478 | TCCCTGGTCCCTTCATTTTCTGA | SEQ ID NO: 1937 | TCCCTGGTCCCTTCATTTTCTGC | SEQ ID NO: 4303 | CCTCACAGTGTGAATAAACT | SEQ ID NO: 6669 |
| rs6457710 | TCCTTTTCTTTTAATGTCATTGTTTGA | SEQ ID NO: 1938 | TCCTTTTCTTTTAATGTCATTGTTTGG | SEQ ID NO: 4304 | AAATTATTGGGATGTGTTTTCTT | SEQ ID NO: 6670 |
| rs204900 | CATACCTGTGTTGGCCCTGACAGA | SEQ ID NO: 1939 | CATACCTGTGTTGGCCCTGACAGC | SEQ ID NO: 4305 | GCTGGGTAGCTGACTGC | SEQ ID NO: 6671 |
| rs5018660 | GCATTTAATAATAGCATCATCTTCACAGGA | SEQ ID NO: 1940 | GCAAAAATAATAGCATCATCTTCACAGGG | SEQ ID NO: 4306 | AATAATGACTTCTTAGCACTGACC | SEQ ID NO: 6672 |
| rs6906587 | CCGCATCTCCTGGAGTTGGC | SEQ ID NO: 1941 | CCGCATCTCCTGGAGTTGGG | SEQ ID NO: 4307 | GAGCTAGTGCTTCCTGCTG | SEQ ID NO: 6673 |
| rs2242653 | GGAAGGGAAGGGTCCCGTGAA | SEQ ID NO: 1942 | GGAAGGGAAGGGTCCCGTGAG | SEQ ID NO: 4308 | GGCCGTGTTCAGTCCTTCT | SEQ ID NO: 6674 |
| rs444921 | TTGTTGCCCACTTAGGGGCTGT | SEQ ID NO: 1943 | TTGTTGCCCACTTAGGGGCTGC | SEQ ID NO: 4309 | CAGAGGGGCAGAGGTTTAG | SEQ ID NO:.6675 |
| rs2187820 | TGTTCTGGGTACTAATCCTTTTCATA | SEQ ID NO: 1944 | TGTTCTGGGTACTAATCCTTTTCATG | SEQ ID NO: 4310 | TCTTTATCCAGTTTACCAAAAAA | SEQ ID NO: 6676 |
| rs2071281 | CACTGCCCACCGGGCTTT | SEQ ID NO: 1945 | CACTGCCCACCGGGCTTC | SEQ ID NO: 4311 | GTGATGTCAACGAGTGCTTC | SEQ ID NO: 6677 |
| rs3116820 | ACCCTAAGTGGTCTCAATTGTTTACTAA | SEQ ID NO: 1946 | ACCCTAAGTGGTCTCAATTGTTTACTAG | SEQ ID NO: 4312 | AGTTATTTTACATACACTATTCTTGG | SEQ ID NO: 6678 |
| rs241407 | CGGAGTCTCGGAACGCCTGT | SEQ ID NO: 1947 | CGGAGTCTCGGAACGCCTGC | SEQ ID NO: 4313 | TGGAAGAAGAGTTCCGGC | SEQ ID NO: 6679 |
| rs6457443 | AAGCAATGGCAATTAAAAGTAGAGTAA | SEQ ID NO: 1948 | AAGCAATGGCAATTAAAAGTAGAGTAG | SEQ ID NO: 4314 | AGTAAATAACCAGTACTAAGTTCTTCC | SEQ ID NO: 6680 |
| rs668558 | TGCCACCTTCTGTACGAGTTTGTTTT | SEQ ID NO: 1949 | TGCCACCTTCTGTACGAGTTTGAAG | SEQ ID NO: 4315 | TTGCTTGGCGAAAACACTAC | SEQ ID NO: 6681 |
| rs2516675 | GAGAATGGATACTTGAGGATCAGTATAGTT | SEQ ID NO: 1950 | GAGAATGGATACTTGAGGATCAGTATAGTC | SEQ ID NO: 4316 | CTAGATGAAGAGGACTACATACATTT | SEQ ID NO: 6682 |
| rs909726 | CAAAGGGTCTCATTCAGCTCACCT | SEQ ID NO: 1951 | CAAAGGGTCTCATTCAGCTCACCC | SEQ ID NO: 4317 | ACTTTTAATACTTAAATAACGACAAT | SEQ ID NO: 6683 |
| rs4842463 | TGATTGAGATGATATTTTTAAACAAAAAAA | SEQ ID NO: 1952 | TGATTGAGATGATATTTTTAAACAAAAAAG | SEQ ID NO: 4318 | TTTTGAAAATTAAGAACAGAAAAC | SEQ ID NO: 6684 |
| rs3020644 | AGAAGTCTTTTCAATACCTTTTTGAACAAT | SEQ ID NO: 1953 | AGAAGTCTTTTCAATACCTTTTTGAACAAC | SEQ ID NO: 4319 | GACCAATAAATAAATGAACATGA | SEQ ID NO: 6685 |
| rs2260801 | GGCAGTGGCTGCGATTCCA | SEQ ID NO: 1954 | GGCAGTGGCTGCGATTCCG | SEQ ID NO: 4320 | GGAACTGAGGGGACAGAAT | SEQ ID NO: 6666 |
| rs1736976 | TGCACTAGTTCCTAACCTATGTAACCTACT | SEQ ID NO: 1955 | TGCACTAGTTCCTAACCTATGTAACCTACC | SEQ ID NO: 4321 | TCTATGATCAAGAGTAGATTAAGAGA | SEQ ID NO: 6687 |
| rs1362065 | AAATAACATTTATTGCATGCTCATTA | SEQ ID NO: 1956 | AAATAACATTTATTGCATGCTCATTG | SEQ ID NO: 4322 | GTATAAGTTATTGTTCTGAGTTCTTCA | SEQ ID NO: 6688 |
| rs3094188 | TCAATGAACTCTAAACTTCCTTCCAACTA | SEQ ID NO: 1957 | TCAATGAACTCTAAACTTCCTTCCAACTC | SEQ ID NO: 4323 | GACATAAAATTGCTGCCC | SEQ ID NO: 6689 |
| rs7764777 | ACCGCAACCGGGTTCCTGA | SEQ ID NO: 1958 | ACCGCAACCGGGTTCCTGC | SEQ ID NO: 4324 | CCTAGCTACTCCCCACAGA | SEQ ID NO: 6690 |
| rs4959117 | TCTTAAGTCTAATTAAGCCAAACAAACTAT | SEQ ID NO: 1959 | TCTTAAGTCTAATTAAGCCAAACAAACTAA | SEQ ID NO: 4325 | AATAGCAATTTAATTAGCAAGCTA | SEQ ID NO: 6691 |
| rs2844621 | AGGACACTTCAAATGGTGTAGTTTCAT | SEQ ID NO: 1960 | AGGACACTTCAAATGGTGTAGTTTCAC | SEQ ID NO: 4326 | TAAACTATCATTATGCTATTATTATTG | SEQ ID NO: 6692 |
| rs3099840 | CTGAAGCCCAGAGAGCCAAGCT | SEQ ID NO: 1961 | CTGAAGCCCAGAGAGCCAAGCC | SEQ ID NO: 4327 | CTGGGACTTGGCTCTTACC | SEQ ID NO: 6693 |
| rs2073525 | GCGGGGCGGGCCTACTGT | SEQ ID NO: 1962 | GCGGGGCGGGCCTACTGC | SEQ ID NO: 4328 | CTGTGTTCCGTACGACAATAT | SEQ ID NO: 6694 |
| rs3094693 | CTTCTCTCCGAGGCTCGCGGA | SEQ ID NO: 1963 | CTTCTCTCCGAGGCTCGCGGC | SEQ ID NO: 4329 | TGAGAAACCTTCCGCTCC | SEQ ID NO: 6695 |
| rs7759272 | GATGAATAGTTGCACTTTAATTTTCAT | SEQ ID NO: 1964 | GATGAATAGTTGCAGTTTAATTTTCAC | SEQ ID NO: 4330 | TGCTCTAAATTTATTAGTGTTATTGT | SEQ ID NO: 6696 |
| rs6911350 | TCTTTCTAGTGCTGTGTCTCATTGTGAG | SEQ ID NO: 1965 | TCTTTCTAGTGCTGTGTCTCATTGTGAC | SEQ ID NO: 4331 | TATATATTTCTTTCTAGGACTTGAAA | SEQ ID NO: 6697 |
| rs2070600 | GTGGCTCGTGTCCTTCCCAACA | SEQ ID NO: 1966 | GTGGCTCGTGTCCTTCCCAACG | SEQ ID NO: 4332 | CTCCCTCTTCCTTCCGG | SEQ ID NO: 6698 |
| rs2269428 | CTCCCACCCCTGAACCCCA | SEQ ID NO: 1967 | CTCCCACCCCTGAACCCCC | SEQ ID NO: 4333 | GAGCTGACCGTGACAGATG | SEQ ID NO: 6699 |
| rs2302399 | ATCAGTCAGGAGGCCGTGCAGT | SEQ ID NO: 1968 | ATCAGTCAGGAGGCCGTGCAGC | SEQ ID NO: 4334 | CGAGATGGGCTCGTCTC | SEQ ID NO: 6700 |
| rs1633098 | TGGTAGTTTGTTATAGAGGTTTGCGTA | SEQ ID NO: 1969 | TGGTAGTTTGTTATAGAGGTTTGCGTC | SEQ ID NO: 4335 | TTTTATTTTGCCATGAGGAT | SEQ ID NO: 6701 |
| rs555007 | GGCTGCTCAGCTGCAGGAAT | SEQ ID NO: 1970 | GGCTGCTCAGCTGCAGGTAC | SEQ ID NO: 4336 | GAGAGTGGCCAGATGGAGAC | SEQ ID NO: 6702 |
| rs2508042 | TGTTCTCAACTGTGTTAACTTATTGAAA | SEQ ID NO: 1971 | TGTTCTCAACTGTGTTAACTTATTGAAG | SEQ ID NO: 4337 | ACATTGTTATTAAAGGTATTTACAAGA | SEQ ID NO: 6703 |
| rs3130653 | TTTCTTTAGTTAGATTAGGCTAGGCTGTT | SEQ ID NO: 1972 | TTTCTTTAGTTAGATTAGGCTAGGCTGTG | SEQ ID NO: 4338 | AAACAAAATTTCAATAACTGGCT | SEQ ID NO: 6704 |
| rs1705003 | CAGAGCCAGCCAATCCCGA | SEQ ID NO: 1973 | CAGAGCCAGCCAATCCCGG | SEQ ID NO: 4339 | CACCTCCTGATGAAGGAGG | SEQ ID NO: 6705 |
| rs764554 | CATTTACCAGGAGAAACCATATTTCAGT | SEQ ID NO: 1974 | CATTTACCAGGAGAAACCATATTTCAGG | SEQ ID NO: 4340 | ACATTGAAATCATACAGAATATATTTT | SEQ ID NO: 6706 |
| rs2532942 | ATCTCGGTTGCCCCCTACCCT | SEQ ID NO: 1975 | ATCTCGGTTGCCCCCTACCCC | SEQ ID NO: 4341 | GTGAGTCCCAAGCACCTT | SEQ ID NO: 6707 |
| rs213207 | CACAACTAACTACACATTCTGACTTAAGGA | SEQ ID NO: 1976 | CACAACTAACTACACATTCTGACTTAAGGG | SEQ ID NO: 4342 | AAATAAAAGAACGTTATGTATCTA | SEQ ID NO: 6708 |
| rs2428494 | GGGGGTGGGTGGGGCAGA | SEQ ID NO: 1977 | GGGGGTGGGTGGGGCAGT | SEQ ID NO: 4343 | GATTCTTTGATTGGGATGAAC | SEQ ID NO: 6709 |
| rs1799910 | CTGCACTCCATCTCGGCCAGTT | SEQ ID NO: 1978 | CTGCACTCCATCTCGGCCAGTC | SEQ ID NO: 4344 | CTTCTCACCCTGTGGGAC | SEQ ID NO: 6710 |
| rs2071480 | CTTTGCGCGCGGCGCTAACT | SEQ ID NO: 1979 | CTTTGCGCGCGGCGCTAACG | SEQ ID NO: 4345 | GTGTAGGGCAGATCTGCC | SEQ ID NO: 6711 |
| rs1079687 | GGCCCCTCAGTGAGGGGT | SEQ ID NO: 1980 | GGCCCCTCAGTGAGGGGC | SEQ ID NO: 4346 | AAGAGTCCAGCTCTTTCCTTT | SEQ ID NO: 6712 |
| rs970902 | AGGGGCTGAGTGGGGGAAT | SEQ ID NO: 1981 | AGGGGCTGAGTGGGGGAAC | SEQ ID NO: 4347 | CAGCTTCCTTCCTGGGGT | SEQ ID NO: 6713 |
| rs6900438 | CAGACATGAGTTACTGCGCCCCA | SEQ ID NO: 1982 | CAGACATGAGTTACTGCGCCCCG | SEQ ID NO: 4348 | CTGAAATTCTTTTTTTAATTTAAAA | SEQ ID NO: 6714 |
| rs213213 | GGGAGAGGCCCTTGCCACA | SEQ ID NO: 1983 | GGGAGAGGCCCTTGCCACG | SEQ ID NO: 4349 | AGTGATTGGGTTCAGGCAG | SEQ ID NO: 6715 |
| rs410909 | CTGTCCCACAACGCTCACTCAGT | SEQ ID NO: 1984 | CTGTCCCACAACGCTCACTCAGG | SEQ ID NO: 4350 | GTGTGTGTGTGCCTGTGTGT | SEQ ID NO: 6716 |
| rs1052486 | GGCCAGGGGCTGGAGGGT | SEQ ID NO: 1985 | GGCCAGGGGCTGGAGGGC | SEQ ID NO: 4351 | CTTCTCCCACCATCACTGT | SEQ ID NO: 6717 |
| rs1150738 | AGTTGTTGGTGGAAGCGGGAGA | SEQ ID NO: 1986 | AGTTGTTGGTGGAAGCGGGAGG | SEQ ID NO: 4352 | GAATGGCACGTCTGGAG | SEQ ID NO: 6718 |
| rs130076 | GAGGTCTCCCGCAGGAGCCA | SEQ ID NO: 1987 | GAGGTCTCCCGCAGGAGCCG | SEQ ID NO: 4353 | ACCTCCTCCTCCAGCC | SEQ ID NO: 6719 |
| rs2395174 | CCTCCCAAATCTCATAATACTGAGTTTCA | SEQ ID NO: 1988 | CCTCCCAAATCTCATAATACTGAGTTTCC | SEQ ID NO: 4354 | GTTCAGAAACCTGGGGCAG | SEQ ID NO: 6720 |
| rs2252223 | GACCCCCGGAAACGTCCCA | SEQ ID NO: 1989 | GACCCCCGGAAACGTCCCG | SEQ ID NO: 4355 | GAGGACCGCCAGGAAC | SEQ ID NO: 6721 |
| rs1264303 | CACTCCCCTTGTTCCATCTTTCCT | SEQ ID NO: 1990 | CACTCCCCTTGTTCCATCTTTCCC | SEQ ID NO: 4356 | TCTCTAATTAGCACAGGTCTGTT | SEQ ID NO: 6722 |
| rs2240061 | CCCArCAAGAAGAGCCTCACGAT | SEQ ID NO: 1991 | CCCATCAAGAAGAGCCTCACGAC | SEQ ID NO: 4357 | ACAATAAACATTTACAAGCCAGA | SEQ ID NO: 6723 |
| rs1345229 | TTCTTCTGAATGTCCCACCCACTT | SEQ ID NO: 1992 | TTCTTOTGAATGTCCCACCCACTC | SEQ ID NO: 4358 | ACTATACATTGCTTAAATGCAGTG | SEQ ID NO: 6724 |
| rs2395185 | ACAGCAGAATTCTCCAGGGAAGAA | SEQ ID NO: 1993 | ACAGCAGAATTCTCCAGGGAAGAC | SEQ ID NO: 4359 | AATTTTTGGTTTCATGTAGTGTA | SEQ ID NO: 6725 |
| rs3130283 | GGTAGAACTGCCCTCATAAGCAGGT | SEQ ID NO: 1994 | GGTAGAACTGCCCTCATAAGCAGGG | SEQ ID NO: 4360 | ACATATACTTTTGGTCACCCTTT | SEQ ID NO: 6726 |
| rs2257914 | TGACATCTGAGAAATGGGATGGAAT | SEQ ID NO: 1995 | TGACATCTGAGAAATGGGATGGAAG | SEQ ID NO: 4361 | GTGACCATGTTTTATTTTCTTGT | SEQ ID NO: 6727 |
| rs916920 | GGATGGGAGCTCCCTGTACAGGA | SEQ ID NO: 1996 | GGATGGGAGCTCCCTGTACAGGG | SEQ ID NO: 4362 | CAGAGGTCAAAGGTTAGTATCAG | SEQ ID NO: 6728 |
| rs2249059 | CAAGCCCTGTTCTTCCTCTCCCA | SEQ ID NO: 1997 | CAAGCCCTGTTCTTCCTCTCCCG | SEQ ID NO: 4363 | TGAATTCTAAATCCTTAACATCCA | SEQ ID NO: 6729 |
| rs2267640 | CCATACTCTACTGGCACAAGGCAT | SEQ ID NO: 1998 | CCATACTCTACTGGCACAAGGCAC | SEQ ID NO: 4364 | GGGGAATTTTCTACCATTTTTA | SEQ ID NO: 6730 |
| rs1150765 | AGTATGGGAGGCAGGCAGCAA | SEQ ID NO: 1999 | AGTATGGGAGGCAGGCAGCAG | SEQ ID NO: 4365 | GTCTTGTGGAGACCTTACTCATT | SEQ ID NO: 6731 |
| rs3749967 | AACAGCTTTGGGTATAGTCTCGGGT | SEQ ID NO: 2000 | AACAGCTTTGGGTATAGTCTCGGGG | SEQ ID NO: 4366 | GAGACTGCCATATCTTTCTGTTT | SEQ ID NO: 6732 |
| rs3817963 | CTTAAGCACACCTTTCAGCCCACA | SEQ ID NO: 2001 | CTTAAGCACACCTTTCAGCCCACG | SEQ ID NO: 4367 | AAGAGTTTTTGAGGAAAATCAG | SEQ ID NO: 6733 |
| rs2051549 | CCATGGAGCTCTTGGGAATCTCA | SEQ ID NO: 2002 | CCATGGAGCTCTTGGGAATCTCG | SEQ ID NO: 4368 | AGACAGAGTTATCCACATAAATTTG | SEQ ID NO: 6734 |
| rs1894408 | TGCACAGTATAGGCAAATCAGGGG | SEQ ID NO: 2003 | TGCACAGTATAGGCAAATCAGGGC | SEQ ID NO: 4369 | ACATTTCATGCTGAAAGATGAT | SEQ ID NO: 6735 |
| rs3130315 | GCTGCAAAGATATTGGGTTTTGGTTA | SEQ ID NO: 2004 | GCTGCAAAGATATTGGGTTTTGGTTG | SEQ ID NO: 4370 | AGAGTGAGATGCTGATGTGTAAG | SEQ ID NO: 6736 |
| rs761187 | CAAAATTCACTTGTGCCCTATGGAGA | SEQ ID NO: 2005 | CAAAATTCACTTGTGCCCTATGGAGG | SEQ ID NO: 4371 | GAAGAATAGCAAGAGACCAAATC | SEQ ID NO: 6737 |
| rs3749966 | GGGCTCCCTGTCCTTGTGGTAT | SEQ ID NO: 2006 | GGGCTCCCTGTCCTTGTGGTAC | SEQ ID NO: 4372 | CTCATCTCACTGATTTTTAGTTGG | SEQ ID NO: 6738 |
| rs2395153 | TGGTTGGACCCAGTAACCCAGAC | SEQ ID NO: 2007 | TGGTTGGACCCAGTAACCCAGAG | SEQ ID NO: 4373 | GGGGACAGACTTTTCTTGTTAG | SEQ ID NO: 6739 |
| rs1150735 | CAAAGCCAGCAATGTCAGGCT | SEQ ID NO: 2008 | CAAAGCCAGCAATGTCAGGCC | SEQ ID NO: 4374 | ATCACTTCTCATGCTGCTATCT | SEQ ID NO: 6740 |
| rs7843 | GTCACATGCTGCCTGAGTCACAT | SEQ ID NO: 2009 | GTCACATGCTGCCTGAGTCACAC | SEQ ID NO: 4375 | TACATCTTATTTCTGCCTCTAGTTT | SEQ ID NO: 6741 |
| rs2074478 | CGTGAATTCTTCCCAATTTAGCCTA | SEQ ID NO: 2010 | CGTGAATTCTTCCCAATTTAGCCTG | SEQ ID NO: 4376 | CTCCTTAAACCTCTTCCTCATT | SEQ ID NO: 6742 |
| rs204993 | CAGGACATCAACATCCTCCTCACT | SEQ ID NO: 2011 | CAGGACATCAACATCCTCCTCACC | SEQ ID NO: 4377 | CTCTTCTCCCTCCTCTGTAGAC | SEQ ID NO: 6743 |
| rs2301271 | GGGGTTATATCGTCTTCCCTCCCA | SEQ ID NO: 2012 | GGGGTTATATCCTCTTCCCTCCCG | SEQ ID NO: 4378 | GTTCTTTAAGTCCTTAAGCACCC | SEQ ID NO: 674-4 |
| rs2284168 | CAGGGACACTTTATTGCTCACCCT | SEQ ID NO: 2013 | CAGGGACACTTTATTGCTCACCCC | SEQ ID NO: 4379 | TATGTGAAAGTTTGTCATAGCTAAG | SEQ ID NO: 6745 |
| rs11244 | CCCCTGAGACCTTACTCCTTCCAGT | SEQ ID NO: 2014 | CCCCTGAGACCTTACTCCTTCCAGC | SEQ ID NO: 4380 | CCAAATCATTTACTTTTCTGTG | SEQ ID NO: 6746 |
| rs1264583 | TGCAGGGTGTTTGTAAACAGCAGT | SEQ ID NO: 2015 | TGCAGGGTGTTTGTAAACAGCAGC | SEQ ID NO: 4381 | CAATTTACACCGGATATTAGG | SEQ ID NO: 6747 |
| rs2074474 | CGGATGTGACCCTGGACCCT | SEQ ID NO: 2016 | CGGATGTGACCCTGGACCCC | SEQ ID NO: 4382 | AGACAGCTCATCCTAACCTAGTC | SEQ ID NO: 6748 |
| rs2213571 | GGTTTAACCCAGGATCTCACTGAAAAC | SEQ ID NO: 2017 | GGTTTAACCCAGGATCTCACTGAAAAG | SEQ ID NO: 4383 | GATCCTACTACAGCAGTTTCTTG | SEQ ID NO: 6749 |
| rs204991 | CTGCCCCTTTGTCTGCACTAAACTA | SEQ ID NO: 2018 | CTGCCCCTTGTCTGCACTAAACTG | SEQ ID NO: 4384 | AAGTTTCCATATGAACCCTT | SEQ ID NO: 6750 |
| rs3129881 | TGGAAAATATACCTGGGGACTGAAA | SEQ ID NO: 2019 | TGGAAAATATACCTGGGGACTGAAG | SEQ ID NO: 4385 | ACTCCAAAAATTAAGACTGAGACC | SEQ ID NO: 6751 |
| rs1049623 | TCGACAGOCCTGAAGATCTGGTT | SEQ ID NO: 2020 | TCGACAGCCCTCAAGATCTGGTC | SEQ ID NO: 4386 | GTCTTGATTTCCCCCTTAATG | SEQ ID NO: 6752 |
| rs974962 | GATGGATTCACCCCATCTCCCA | SEQ ID NO: 2021 | GATGGATTCACCCCATCTCCCG | SEQ ID NO: 4387 | ATAAAGTTTACTTGTTTTACATTCCA | SEQ ID NO: 6753 |
| rs8512 | GCAAGGGTGTGAGATGTTCCCT | SEQ ID NO: 2022 | GCAAGGGTGTGAGATGTTCCCC | SEQ ID NO: 4388 | TGCTGTAAATGCAGGTCTCTT | SEQ ID NO: 6754 |
| rs2071287 | CTTGCATTATTCTTTCCCGCTCTCT | SEQ ID NO: 2023 | CTTGCATTATTCTTCCCGCTCTCC | SEQ ID NO: 4389 | TCAAGCAAACTCTTGGGTTAA | SEQ ID NO: 6755 |
| rs1058318 | GGACATTGGATTCATTTCCTCAAAATA | SEQ ID NO: 2024 | GGACATTGGATTCAAACCTCAAAATG | SEQ ID NO: 4390 | GGAGAGAAAGGAGAAAAATCAG | SEQ ID NO: 6756 |
| rs2269702 | GGGTGAGAGCTACTTTTTCTACCTCCTA | SEQ ID NO: 2025 | GGGTGAGAGCTACTTTTTCTACCTCCTG | SEQ ID NO: 4391 | TCCACAAGTCATCTCTATATCTTC | SEQ ID NO: 6757 |
| rs2286404 | AGGAGCAAGTGAGTCCTGTTGTAAT | SEQ ID NO: 2026 | AGGAGCTTTGTGAGTCCTGTTGTAAC | SEQ ID NO: 4392 | CTTTTAGACACTTTATATATCAAGGG | SEQ ID NO: 6758 |
| rs2269707 | ATCAGCTCCCAGCCCCACCT | SEQ ID NO: 2027 | ATCAGCTCCCAGCCCGACCC | SEQ ID NO: 4393 | CCAAAGTCCCAGGTTTACAAG | SEQ ID NO: 6759 |
| rs2269424 | GTCCCACTACCCTCATCCCCAT | SEQ ID NO: 2028 | GTCCGACTACCCTCATCCCCAC | SEQ ID NO: 4394 | TAGAAGTATCTTTCCAACCCTCT | SEQ ID NO: 6760 |
| rs2040409 | GCCAAAGACCAGCAGGAGCATA | SEQ ID NO: 2029 | GCCAAAGACCAGCAGGAGCATC | SEQ ID NO: 4395 | AAGCAATGAACAAGTTGACTTTA | SEQ ID NO: 6761 |
| rs241424 | GGGAGAAGCATACCCATCCTGAGA | SEQ ID NO: 2030 | GGGAGAAGCATACCCATCCTGAGG | SEQ ID NO: 4396 | AGTGACCCTGGAGAGATACTTT | SEQ ID NO: 6762 |
| rs2854275 | CGTGGTTCTGGCTCCACATTTA | SEQ ID NO: 2031 | CGTGGTTCTGGCTCCACATTTC | SEQ ID NO: 4397 | CAGGAAGATACCACCAAAGTTA | SEQ ID NO: 6763 |
| rs3880457 | GAGTCAGCCTCAGGGTCTGTTCTA | SEQ ID NO: 2032 | GAGTCAGCCTCAGGGTGTGTTCTG | SEQ ID NO: 4398 | GATCTCCTTTAGACCTTAACTGTT | SEQ ID NO: 6764 |
| rs4711206 | CTTTTCTCTCCACATCCCAGCCT | SEQ ID NO: 2033 | CTTTTCTCTCCACATCCCAGCCC | SEQ ID NO: 4399 | CTAATCCAGCTCTTACAATCTCA | SEQ ID NO: 6765 |
| rs1233495 | TGGGAAAGTTGGAGAACCATCCT | SEQ ID NO: 2034 | TGGGAAAGTTGGAGAACCATCCC | SEQ ID NO: 4400 | ATGGGCTAATGTAAACAAATGTA | SEQ ID NO: 6766 |
| rs3130055 | CCCTATTCGTTTTTGAACCGGTCA | SEQ ID NO: 2035 | CCCTATTCGTTTTTGAACCGGTCG | SEQ ID NO: 4401 | TTAAGGACACCTGTACTGAGAAG | SEQ ID NO: 6767 |
| rs2071593 | TTGGTAGCCTCGATGTCCTCCTT | SEQ ID NO: 2036 | TTGGTAGCCTCGATGTCCTCCTC | SEQ ID NO: 4402 | GTGAAACTGGGATGATAATAATG | SEQ ID NO: 6768 |
| rs7758397 | CCAGCCAGCAAGTCAATCAGAAC | SEQ ID NO: 2037 | CCAGGCAGCAAGTCAATCAGAAG | SEQ ID NO: 4403 | CTTCACCCCATCTACAATATTTT | SEQ ID NO: 6769 |
| rs3130453 | TCCAGGGGAACATAGATGGCTGA | SEQ ID NO: 2038 | TCCAGGGGAACATAGATGGCTGG | SEQ ID NO: 4404 | GACAGAATCTAGAGCCTTCAAAT | SEQ ID NO: 6770 |
| rs2242657 | CATCAGTCAGGTATTGGGGTGCTT | SEQ ID NO: 2039 | CATCAGTCAGGTATTGGGGTGCTC | SEQ ID NO: 4405 | CTACCCTGACTTAACTAGCTCCT | SEQ ID NO: 6771 |
| rs3130605 | ACTGTGCCTGCTTGCCATTAATCA | SEQ ID NO: 2040 | ACTGTGCCTGCTTGCCATTAATCG | SEQ ID NO: 4406 | AGATAAGGCACAACCCTATTACT | SEQ ID NO: 6772 |
| rs3093559 | GGAGGAGGCTGAAGGAGAAAGAAA | SEQ ID NO: 2041 | GGAGGAGGCTGAAGGAGAAAGAAG | SEQ ID NO: 4407 | GGAGAATATTAGAGAGAGATGGG | SEQ ID NO: 6773 |
| rs2235498 | AGGAAGCATCAGATGGGTGTCGA | SEQ ID NO: 2042 | AGGAAGCATCAGATGGGTGTCGG | SEQ ID NO: 4408 | GGAGACTGAAATAACAACACAAG | SEQ ID NO: 6774 |
| rs3135034 | CATTCAGTGCTGGAGACCAGCTA | SEQ ID NO: 2043 | CATTCAGTGCTGGAGACCAGCTG | SEQ ID NO: 4409 | TGGGATTTTGTGAGTATCTTTAG | SEQ ID NO: 6775 |
| rs3129952 | TTTTTCGCTTGGATCGGAAAGTG | SEQ ID NO: 2044 | TTTTTCGCTTGGATCGGAAAGTC | SEQ ID NO: 4410 | AAAATTTTTTTCCTGACTCAATT | SEQ ID NO: 6776 |
| rs6457602 | AATGCATCACACTAGCCCACAGG | SEQ ID NO: 2045 | AATGCATCACACAAGCCCACAGG | SEQ ID NO: 4411 | TTATTTACAACTCAGCTGGAAG | SEQ ID NO: 6777 |
| rs2523451 | TTCCCCCATGATCCCTAGCCTAT | SEQ ID NO: 2046 | TTCCCCCATGATCCCTAGCCTAC | SEQ ID NO: 4412 | CTTTTCTGTGGATGAAAATGTAA | SEQ ID NO: 6778 |
| rs497239 | GCCAGTCAGAACTGCCCTCAGA | SEQ ID NO: 2047 | GCCAGTCAGAACTGCCCTCAGG | SEQ ID NO: 4413 | AGACCACAGAGTCTACTCCTCTC | SEQ ID NO: 6779 |
| rs4959050 | CAGAGAATTGATAATTGCCCGGCA | SEQ ID NO: 2048 | CAGAGAATTGATAATTGCCCGGCG | SEQ ID NO: 4414 | TTTCATTTTCTTACAACCATGA | SEQ ID NO: 6780 |
| rs714289 | AGGTGATCCTCTTGCTTGCCTCTA | SEQ ID NO: 2049 | AGGTGATCCTCTTGCTTGCCTCTG | SEQ ID NO: 4415 | CTTGACATTTTTCAAACACAATC | SEQ ID NO: 6781 |
| rs447250 | ATGCTCCTGCCCTAAAGTGCCA | SEQ ID NO: 2050 | ATGCTCCTGCCCTAAAGTGCCG | SEQ ID NO: 4416 | TGCTATTGTTTGCAAGTTTAATT | SEQ ID NO: 6782 |
| rs2844775 | CAGGCTATTTGAGGTTGAGGCAAA | SEQ ID NO: 2051 | CAGGCTATTTGAGGTTGAGGCAAG | SEQ ID NO: 4417 | TCACATAAGTACGAGTGTCTCATT | SEQ ID NO: 6783 |
| rs3135002 | AAAAAAGGGAAAGCGGCAGCTA | SEQ ID NO: 2052 | AAAAAAGGGAAAGCGGCAGCTC | SEQ ID NO: 4418 | CTTGAATTTCTAAAGTGCAATGT | SEQ ID NO: 6784 |
| rs3077 | CAGCAATTCAGTCAGCCACTGGA | SEQ ID NO: 2053 | CAGCAATTCAGTCAGCCACTGGG | SEQ ID NO: 4419 | TAGTTTTCACATGAAGTGAGAAGA | SEQ ID NO: 6785 |
| rs3094205 | AAGGGACAGGCTGCTTGGATCA | SEQ ID NO: 2054 | AAGGGACAGGCTGCTTGGATCG | SEQ ID NO: 4420 | GATTGTAGATGACCTACAACACC | SEQ ID NO: 6786 |
| rs6927088 | CACTTCCAGAACTCCTCTTCCCAG | SEQ ID NO: 2055 | CACTTCCAGAACTCCTCTTCCCAC | SEQ ID NO: 4421 | CTGAAACTTCCTACCCACTAGAC | SEQ ID NO: 6787 |
| rs2857174 | TTGAGAAAAATGCATTTGTCCCGT | SEQ ID NO: 2056 | TTGAGAAAAATGCATTTGTCCCGC | SEQ ID NO: 4422 | GTTGGAGAATTCGTTAAGTTTGT | SEQ ID NO: 6788 |
| rs181997 | GCAGAGAAAAGCCTGCACTGGA | SEQ ID NO: 2057 | GCAGAGAAAAGCCTGCACTGGG | SEQ ID NO: 4423 | ATCTCTAGAAAAGGAACTGGAAG | SEQ ID NO: 6789 |
| rs261950 | GCAGCTGAGAGTGAGTTCACACCT | SEQ ID NO: 2058 | GCAGCTGAGAGTGAGTTCACACCA | SEQ ID NO: 4424 | GTACTCTAAAATGAGGAGGTGCT | SEQ ID NO: 6790 |
| rs3117329 | CCTGGTGATCTGGTTGCTTTGACA | SEQ ID NO: 2059 | CCTGGTGATCTGGTTGCTTTGACG | SEQ ID NO: 4425 | ATTCCTAGTGTCTGAAAATGAAAG | SEQ ID NO: 6791 |
| rs3128931 | ACTCTCCCTTTTTGCAGGGTCAT | SEQ ID NO: 2060 | ACTCTCCCTTTTTGCAGGGTCAC | SEQ ID NO: 4426 | CTACAAATCATAAGCATGTCATCT | SEQ ID NO: 6792 |
| rs6904456 | CTGTCTTCCCCCATTCTTCACCT | SEQ ID NO: 2061 | CTGTCTTCCCCCATTCTTCACCC | SEQ ID NO: 4427 | AATCCTAATTCTCCTTCAGAATC | SEQ ID NO: 6793 |
| rs4713216 | CCCCTATTAACGCTGACTTGGGA | SEQ ID NO: 2062 | CCCCTATTAACGCTGACTTGGGG | SEQ ID NO: 4428 | AGGAAAGGAAAGTTGTAACAGAA | SEQ ID NO: 6794 |
| rs3097671 | CAGAGTCACCAACCCCAGTACCAC | SEQ ID NO: 2063 | CAGAGTCACCAACCCCAGTACCAG | SEQ ID NO: 4429 | GTGCACAGCTAAGAAAATGAGTA | SEQ ID NO: 6795 |
| rs3135368 | TTTCCCAAGGTTAGGGACATGCT | SEQ ID NO: 2064 | TTTCCCAAGGTTAGGGACATGCA | SEQ ID NO: 4430 | GAAAGAAAAAATCATCAAATGAC | SEQ ID NO: 6796 |
| rs1264323 | CTGCTTGGTATTTCCCTGAGGCTA | SEQ ID NO: 2065 | CTGCTTGGTATTTCCCTGAGGCTG | SEQ ID NO: 4431 | TGAATTTGACCATTAAAAAAAAT | SEQ ID NO: 6797 |
| rs3094073 | CCTGGAAATAGGGTAAAAGCTGCAT | SEQ ID NO: 2066 | CCTGGAAATAGGGTAAAAGCTGCAC | SEQ ID NO: 4432 | GGCTTGAAAATTCATCTCTTAAT | SEQ ID NO: 6798 |
| rs2523995 | TCCTTGACCCCTCCACAATCTACA | SEQ ID NO: 2067 | TCCTTGACCCCTCCACAATCTACG | SEQ ID NO: 4433 | TCCTGTCGTATCTCATGAAATAG | SEQ ID NO: 6799 |
| rs3131635 | CCACAGTCAGGTTGTTTGATGGGA | SEQ ID NO: 2068 | CCACAGTCAGGTTGTTTGATGGGG | SEQ ID NO: 4434 | ATGAAAAGAGACAGCAGAAGTTT | SEQ ID NO: 6800 |
| rs1610724 | TCCTCCTCTTCTCACCTGCTTGTA | SEQ ID NO: 2069 | TCCTCCTCTTCTCACCTGCTTGTG | SEQ ID NO: 4435 | CTGGACACATACTATTCAAACATC | SEQ ID NO: 6801 |
| rs4713337 | CACCAGTTTTAAGTGCACAACCCAA | SEQ ID NO: 2070 | CACCAGTTTTAAGTGCACAACCCAG | SEQ ID NO: 4436 | TCTCACAAAGTAGACACACTTGA | SEQ ID NO: 6802 |
| rs2855442 | AGGGGACTAGGGAACTCCCCTTA | SEQ ID NO: 2071 | AGGGGACTAGGGAACTCCCCTTG | SEQ ID NO: 4437 | AGGCTTGACTTTCTGTGTATGT | SEQ ID NO: 6803 |
| rs885915 | TGGCACAAGGTCCTATTTGGAGT | SEQ ID NO: 2072 | TGGCACAAGGTCCTATTTGGAGC | SEQ ID NO: 4438 | ATAACAGCAGCTTCTTAATGAAA | SEQ ID NO: 6804 |
| rs241440 | GCACTTGTCCCTCCTTGTGTGTTA | SEQ ID NO: 2073 | GCACTTGTCCCTCCTTGTGTGTTG | SEQ ID NO: 4439 | CTGTGTCACTTGTATCTGAGGA | SEQ ID NO: 6805 |
| rs879882 | GTCCCTTGAAGGGGAAGTAGGGA | SEQ ID NO: 2074 | GTCCCTTGAAGGGGAAGTAGGGG | SEQ ID NO: 4440 | CAACCCCTTAGTCTGTTAGATG | SEQ ID NO: 6806 |
| rs6937061 | CCTCATTTrCAGTTCTGGGATGGA | SEQ ID NO: 2075 | CCTCATTTTCAGTTCTGGGATGGG | SEQ ID NO: 4441 | ACTCTAATCTCTCTAAATCATGCC | SEQ ID NO: 6807 |
| rs2023372 | CCCTTCATGCTTATGTCTCCCCA | SEQ ID NO: 2076 | CCCTTCATGCTTATGTCTCCCCG | SEQ ID NO: 4442 | TCCTGCTTTATACAAGTAATGTGT | SEQ ID NO: 6808 |
| rs1610601 | TTTACAAGCTGCATCCCATCTCAT | SEQ ID NO: 2077 | TTTACAAGCTGCATCCCATCTCAG | SEQ ID NO: 4443 | TAAGGAGGTGATGTAACTGAGTT | SEQ ID NO: 6809 |
| rs29228 | CTTACGGCCATCTCGGACAAAAA | SEQ ID NO: 2078 | CTTACGCCCATCTCGGACAAAAG | SEQ ID NO: 4444 | AGAAATGTATGTCTCAGTTGTGTT | SEQ ID NO: 6810 |
| rs7454372 | GTTGAACATCATGGTTGCCGAT | SEQ ID NO: 2079 | GTTGAACATCATGGTTGCCGAC | SEQ ID NO: 4445 | GTCATAAATAACAGTTGGAACAAA | SEQ ID NO: 6811 |
| rs707937 | GAACACTGTGGGCCCTCAAGTTG | SEQ ID NO: 2050 | GAACACTGTGGGCCCTCAAGTTC | SEQ ID NO: 4446 | ATGGAAATATAAAGGGCAGATC | SEQ ID NO: 6812 |
| rs7341251 | GGGATAGATGAAAGGGGCCATCT | SEQ ID NO: 2081 | GGGATAGATGAAAGGGGCCATCC | SEQ ID NO: 4447 | GAAAGGAAAAGATATCTGCTTG | SEQ ID NO: 6813 |
| rs1800750 | TTTTTCCTGCATCCTGTCTGGAAA | SEQ ID NO: 2082 | TTTTTCCTGCATCCTGTCTGGAAG | SEQ ID NO: 4448 | TAGAAGGAAACAGACCACAGAC | SEQ ID NO: 6814 |
| rs2394518 | CCCTCATGGTCATGAGCTCCATT | SEQ ID NO: 2083 | CCCTCATGGTCATGAGCTCCATA | SEQ ID NO: 4449 | TTGTTCTCATACCTCTCATCCT | SEQ ID NO: 6815 |
| rs2301225 | GCAATGTTCACACAAAAAATGCCT | SEQ ID NO: 2084 | GCAATGTTCACACAATTAAATGCCC | SEQ ID NO: 4450 | TCCAGAGATCTTACAGGTTTCTA | SEQ ID NO: 6816 |
| rs1264459 | TGGAAACGGGATTACAATGAAGCA | SEQ ID NO: 2085 | TGGAAACGGGATTACAATGAAGCG | SEQ ID NO: 4451 | GAGGTCTTTTTGAAGTCATG | SEQ ID NO: 6817 |
| rs7773955 | GGCACTGATGGTACCTCATTAGGCA | SEQ ID NO: 2086 | GGCACTGATGGTACCTCATTAGGCG | SEQ ID NO: 4452 | TTGTGAGGAATGTACATATACTGC | SEQ ID NO: 6818 |
| rs15912 | TCTTCTGTGTCACACACAGCCGTG | SEQ ID NO: 2087 | TCTTCTGTGTCACACACAGCCCTC | SEQ ID NO: 4453 | ATACTCCTCCACCTGAGATACC | SEQ ID NO: 6819 |
| rs1419675 | CAGTTGCCATACTGAACAGCCATTT | SEQ ID NO: 2088 | CAGTTGCCATACTGAACAGCCATTG | SEQ ID NO: 4454 | ATACAGGCTCTCTATATTCCAATG | SEQ ID NO: 6820 |
| rs7450074 | CTGCTTGCTCTAAACCCAGCAAT | SEQ ID NO: 2089 | CTGCTTGCTCTAAACCCAGCTAC | SEQ ID NO: 4455 | AGTTACTCCCTGCTTGGATAAT | SEQ ID NO: 6821 |
| rs437179 | CCAAATCCAGAGGCTCCAACAT | SEQ ID NO: 2090 | CCAAATCCAGAGGCTCCAACAG | SEQ ID NO: 4456 | CAGCTAAGGCTTAGTAGTCCAG | SEQ ID NO: 6822 |
| rs3132486 | TCCTTGTTGCACTGGTTAGGATGA | SEQ ID NO: 209T | TCCTTGTTGCACTGGTTAGGATGG | SEQ ID NO: 4457 | TGTTAGGTGTTTAAACAAGAATGA | SEQ ID NO: 6823 |
| rs2071286 | GAGTGGGGTGGGGTGAAATGT | SEQ ID NO: 2092 | GAGTGGGGTGGGGTGAAATGC | SEQ ID NO: 4458 | TTGAGTGTAGCTGGATTAAGTGT | SEQ ID NO: 6824 |
| rs2395029 | GACACATACTGTCCAATTCCCCTGT | SEQ ID NO: 2093 | GACACATACTGTCCAATTCCCCTGG | SEQ ID NO: 4459 | GCAGCTGTAATGTGTAGTTCAAT | SEQ ID NO: 6825 |
| rs7765791 | TGCAGTTCACTGACTCTCCTGCATA | SEQ ID NO: 2094 | TGCAGTTCACTGACTCTCCTGCATG | SEQ ID NO: 4460 | CATAGCCCTTATATTTGCTCTTC | SEQ ID NO: 6826 |
| rs3094576 | AAAGTCTCCCAGCTGCTCCTTCTT | SEQ ID NO: 2095 | TAAGTCTCCCAGCTGCTCCTTCTG | SEQ ID NO: 4461 | ATCTCCTTTATTGGTTTCTCCTC | SEQ ID NO: 6827 |
| rs3819269 | AGCTCAGACCTTGGCCATGAACA | SEQ ID NO: 2096 | AGCTCAGACCTTGGCCATGAACG | SEQ ID NO: 4462 | CAGGAATTTCTTGAAGGAAGAT | SEQ ID NO: 6828 |
| rs2074471 | CTGCACAATAGAAGCCCCCCTT | SEQ ID NO: 2097 | CTGCACAATAGAAGCCCCCCTC | SEQ ID NO: 4463 | CTCTTTGCACTTTCTAATCAGC | SEQ ID NO: 6829 |
| rs6929716 | AGTGAGGCCAGATTTTCCTCTTGTA | SEQ ID NO: 2098 | AGTGAGGCCAGATTTTCCTCTTGTG | SEQ ID NO: 4464 | TTTAGCCAAAACAACATATTGTT | SEQ ID NO: 6830 |
| rs2523608 | CTCGTGTTTTCCTGATCCTGCCT | SEQ ID NO: 2099 | CTCGTGTTTCCTGATCCTGCCC | SEQ ID NO: 4465 | GGGTCTGTAGTCATACTTCTGG | SEQ ID NO: 6831 |
| rs1264540 | CGCTTCACCCCAGAAGCAGTG | SEQ ID NO: 2100 | CGCTTCACCCCAGAAGCAGTC | SEQ ID NO: 4466 | GACTCCTATTCTTCAATACCAGG | SEQ ID NO: 6832 |
| rs3116996 | AACAATGGGGAGGCGTTTCTCT | SEQ ID NO: 2101 | AACAATGGGGAGGCGTTTCTCA | SEQ ID NO: 4467 | TGTATGAATTATTAGCTCAGGAGG | SEQ ID NO: 6833 |
| rs3130933 | GAGCATTGGATATTCCCATCCCT | SEQ ID NO: 2102 | GAGOATTGGATATTCCCATCCCC | SEQ ID NO: 4468 | CCTCAGTAACTGAAGGACAAAC | SEQ ID NO: 6834 |
| rs6940867 | AGTTGTGTGGCAGAAGGGGAACT | SEQ ID NO: 2103 | AGTTGTGTGGCAGAAGGGGAACC | SEQ ID NO: 4469 | CTGTTTCCTAACTTCTGGATAAG | SEQ ID NO: 6835 |
| rs2535250 | GCAACTTGGGAGAGTGTGAGCTTCA | SEQ ID NO: 2104 | GCAACTTGGGAGAGTGTGAGCTTCG | SEQ ID NO: 4470 | AGTCAGACAGGTCTAGGCTATTAG | SEQ ID NO: 6836 |
| rs6903608 | CCGTTTGGATTCCCAGGAGACA | SEQ ID NO: 2105 | CCGTTTGGATTCCCAGGAGACG | SEQ ID NO: 4471 | CACAGATGAGACACAAGGTAAG | SEQ ID NO: 6837 |
| rs3117435 | TGAGAATGGTGGTTCTTCCATCACG | SEQ ID NO: 2106 | TGAGAATGGTGGTTCTTCCATCACC | SEQ ID NO: 4472 | TATAGCTATTTCCACATCCATTT | SEQ ID NO: 6838 |
| rs1264425 | GGGTCTTGGGTTAGAGCCAAAATGG | SEQ ID NO: 2107 | GGGTCTTGGGTTAGAGCCAAAATGC | SEQ ID NO: 4473 | TTTGAGGATGAGTATTTTTTTTTT | SEQ ID NO: 6839 |
| rs3873342 | CTACTGGCTGGGGGATCACCAA | SEQ ID NO: 2108 | CTAGTGGCTGGGGGATCACCAG | SEQ ID NO: 4474 | TGTTCTACCATGAACAGGTCTAC | SEQ ID NO: 6840 |
| rs1265059 | CCCACAGAACCACAGACTTTGAAC | SEQ ID NO: 2109 | CCCACAGAACCACAGATTTTGAAG | SEQ ID NO: 4475 | GTTGCTGAGTAAATAGCAGACC | SEQ ID NO: 6841 |
| rs6911634 | AAAAATGGAGGAGAAAACAACCCAA | SEQ ID NO: 2110 | AAAAATGGAGGAGAAAACAACCCAG | SEQ ID NO: 4476 | GCGTAGAAGGACTATACAGTACT | SEQ ID NO: 6842 |
| rs464921 | TTTGCCATCACTGCCATTAAGGTA | SEQ ID NO: 2TTT | TTTGCCATCACTGCCATTAAGGTG | SEQ ID NO: 4477 | GTGAAGTAGGGTAAGGAATAGGG | SEQ ID NO: 6843 |
| rs4713221 | ATAGTCAGCCCACCCGCTCAACT | SEQ ID NO: 2112 | ATAGTCAGCCCACCCGCTCAACA | SEQ ID NO: 4478 | AGCTTCCATAGTCTTGTCTATTTG | SEQ ID NO: 6844 |
| rs382544 | GGCCCCTATCACTTCCATATGTGT | SEQ ID NO: 2113 | GGCCCCTATCACTTCCATATGTGC | SEQ ID NO: 4479 | CTGGACACCTCTAAGATCATAGG | SEQ ID NO: 6845 |
| rs3130977 | GAAACTCCAAGTCTGGAATCAGCAA | SEQ ID NO: 2114 | GAAACTCCAAGTCTGGAATCAGCAG | SEQ ID NO: 4480 | AATGTATTACATTGACCAGAAAGG | SEQ ID NO: 6846 |
| rs2395352 | GTCTGTTGGGGCTTAGTGCATTTA | SEQ ID NO: 2115 | GTCTGTTGGGGCTTAGTGCATTTG | SEQ ID NO: 4481 | CCTTTCATTAAAGTCCAAAACA | SEQ ID NO: 6847 |
| rs984802 | GCTGTGCGACTGGGCAATATTTTT | SEQ ID NO: 2116 | GCTGTGCGACTGGGCAATATTTTG | SEQ ID NO: 4482 | TTCACTCTCTAGCCTCATTTTC | SEQ ID NO: 6848 |
| rs1049633 | CTGAGAATCTGGGGGTGAGGAA | SEQ ID NO: 2117 | CTGAGAATCTGGGGGTGAGGAG | SEQ ID NO: 4483 | ACAAGAAGGAGAGGAAAATGTT | SEQ ID NO: 6849 |
| rs6923005 | ACACTGGACCCATTTTGCAGATAGA | SEQ ID NO: 2118 | ACACTGGACCCATTTTGCAGATAGG | SEQ ID NO: 4484 | AAACTAGGGTGGGTCTAAGGTAT | SEQ ID NO: 6850 |
| rs2001181 | TGGGCCGTTCAGAGTGTCATCA | SEQ ID NO: 2119 | TGGGCCGTTCAGAGTGTCATCG | SEQ ID NO: 4485 | TTACCATGACTGACCTGAATTT | SEQ ID NO: 6851 |
| rs2071541 | CCCTAACTGCATCACCTTTTCCCTT | SEQ ID NO: 2120 | CCCTAACTGCATCACCTTTTCCCTC | SEQ ID NO: 4486 | AGCTTTTTAATTCCTATGAGGC | SEQ ID NO: 6852 |
| rs3807039 | TGACTTGGCCAAGTTACACCTCAGT | SEQ ID NO: 212T | TGACTTGGCCAAGTTACACCTCAGG | SEQ ID NO: 4487 | GTGAGGTCTGTAGCAGGATAGA | SEQ ID NO: 6853 |
| rs6918223 | TGAGGGTTGGAAAAGCTTGTCTGA | SEQ ID NO: 2122 | TGAGGGTTGGAAAAGCTTGTCTGC | SEQ ID NO: 4488 | TTAATGACAAACCCAGAGACTG | SEQ ID NO: 6854 |
| rs3130501 | CCCAGTCATCCTCAGTTTCTTTCAT | SEQ ID NO: 2123 | CCCAGTCATCCTCAGTTTCTTTCAC | SEQ ID NO: 4489 | TCCTACATCCTATCCTTAAGAAAC | SEQ ID NO: 6855 |
| rs3869092 | AGGGAGATCAGCTTGCTCACAGT | SEQ ID NO: 2124 | AGGGAGATCAGCTTGCTCACAGC | SEQ ID NO: 4490 | GGCCATCTTTTAATCCATATTT | SEQ ID NO: 6856 |
| rs1736920 | CCATGAGAGATGCAAAGTGCTTGAA | SEQ ID NO: 2125 | CCATGAGAGATGCAAAGTGCTTGAG | SEQ ID NO: 4491 | TTTCTGACTCTTCCTTTCAGAC | SEQ ID NO: 6857 |
| rs3823418 | CCGTAGGCACAAAAATGGTAAAGGA | SEQ ID NO: 2126 | CCGTAGGCACAAAAATGGTAAAGGG | SEQ ID NO: 4492 | TTCAAGAAGAAATGCGTAGAAC | SEQ ID NO: 6858 |
| rs2844802 | CAGGAGACTAAGACGTGTCCTTTGCT | SEQ ID NO: 2127 | CAGGAGACTAAGACGTGTCCTTTGCA | SEQ ID NO: 4493 | TGTAGACTCCATATCTTGCACTT | SEQ ID NO: 6859 |
| rs2394412 | GCCCCATCAAGCCGACTTCTACT | SEQ ID NO: 2128 | GCCCCATCAAGCCGACTTCTACC | SEQ ID NO: 4494 | GTGACTCATTACCCAGTCATGT | SEQ ID NO: 6860 |
| rs439844 | TAGATCTGGGGTTGGGGATGGA | SEQ ID NO: 2129 | AAGATCTGGGGTTGGGGATGGG | SEQ ID NO: 4495 | ACAGAGAGTATGAGGGACTTGA | SEQ ID NO: 6861 |
| rs3763309 | CCTCCCAACTCCTCCTGCAAAGA | SEQ ID NO: 2130 | CCTCCCAACTCCTCCTGCAAAGC | SEQ ID NO: 4496 | TTTCTTTACCACTGTTTTCTACAC | SEQ ID NO: 6862 |
| rs7383312 | CTCCAGTTCTTTGCAAATGACATGA | SEQ ID NO: 2131 | CTCCAGTTCTTTGCAAATGACATGG | SEQ ID NO: 4497 | GGCTGAATAGTACTCCACATACA | SEQ ID NO: 6863 |
| rs1633021 | AGCAGGGAACAGGAAACTCAGTCTT | SEQ ID NO: 2132 | AGCAGGGAACAGGAAACTCAGTCTC | SEQ ID NO: 4498 | ACGACTGTCAGAAACTGAATTC | SEQ ID NO: 6864 |
| rs1367727 | ACAGCCACTAGTCACATGTGGCTAT | SEQ ID NO: 2133 | ACAGCCACTAGTCACATGTGGCTAC | SEQ ID NO: 4499 | GAGAACTTAAAAATGTGGCTAGTG | SEQ ID NO: 6865 |
| rs2269423 | CAAGATAGGGGTGAAGAGGTGGAAA | SEQ ID NO: 2134 | CAAGATAGGGGTGAAGAGGTGGAAC | SEQ ID NO: 4500 | AGAGAAGGTTAAACCCTCACAG | SEQ ID NO: 6866 |
| rs29269 | CTTCAGGCCTACCTAGCCCAGGT | SEQ ID NO: 2135 | CTTCAGGCCTACCTAGCCCAGGC | SEQ ID NO: 4501 | GGGTTAAAGCAGATAAACGAAG | SEQ ID NO: 6867 |
| rs2894054 | TGCTCCTATACCCTGGTCAACATTA | SEQ ID NO: 2136 | TGCTCCTATACCCTGGTCAACATTG | SEQ ID NO: 4502 | GGTTGTCAATCCTTAATTTCTTT | SEQ ID NO: 6868 |
| rs2534674 | CTGGGACCATAGTCCCCTTCAATA | SEQ ID NO: 2137 | CTGGGACCATAGTCCCCTTCAATG | SEQ ID NO: 4503 | GACAGATCTACAAGGACTCTCTACA | SEQ ID NO: 6869 |
| rs6915177 | CGTCTCAGCCCGTGAAAAAAACTT | SEQ ID NO: 2138 | CGTCTCAGCCCGTGAAAAITAACTC | SEQ ID NO: 4504 | CAGGTGATCAGTAGTGAGTCATG | SEQ ID NO: 6870 |
| rs4713559 | CCTTGTGAATCCCATCCTGGAAT | SEQ ID NO: 2139 | CCTTGTGAATCCCATCCTGGAAG | SEQ ID NO: 4505 | GAAGGTAAGATTGAGATTTGTTAGA | SEQ ID NO: 6871 |
| rs7382836 | GCCTCCTTAATGCCAGTGGTAACAT | SEQ ID NO: 2140 | GCCTCCTTAATGCCAGTGGTAACAG | SEQ ID NO: 4506 | AATACAGCCCCAGAATATCATT | SEQ ID NO: 6872 |
| rs4071986 | GACTCAATCTTCCTTCCTCTTGCCT | SEQ ID NO: 2141 | GACTCAATCTTCCTTCCTCTTGCCG | SEQ ID NO: 4507 | AGTGTTCCTCACTTAGTCTTGG | SEQ ID NO: 6873 |
| rs735883 | GGGTCTCTGCCCTTGTCTTTGCT | SEQ ID NO: 2142 | GGGTCTCTGCCCTTGTCTTTGCC | SEQ ID NO: 4508 | CTTCTTCTATCTCTACTCCTTGGG | SEQ ID NO: 6874 |
| rs3793127 | CTGCTTCCTTCTTTACTTCCCTGGA | SEQ ID NO: 2143 | CTGCTTCGTTCTTTACTTCCCTGGG | SEQ ID NO: 4509 | GGCTGTTTCCTAATACCTTTTT | SEQ ID NO: 6875 |
| rs2301269 | CACACACCTACATCCTGCCAAGAT | SEQ ID NO: 2144 | CACACACCTACATCCTGCCAAGAA | SEQ ID NO: 4510 | ATATTACTTGCCCAATCTGTCC | SEQ ID NO: 6876 |
| rs2844685 | AGAACACAGGCTCTGCTGTCAAGT | SEQ ID NO: 2145 | AGAACACAGGCTCTGCTGTCAAGC | SEQ ID NO: 4511 | GACCAGAATTAGAGCCTAGCTC | SEQ ID NO: 6877 |
| rs6908943 | CAGATGCACCTATTTCATGGTTCAGA | SEQ ID NO: 2146 | CAGATGCACCTATTTCATGGTTCAGG | SEQ ID NO: 4512 | AGGATTTAAACAGCTGAAGAACT | SEQ ID NO: 6878 |
| rs7383578 | AGGAACAGGACCCCTGCCAAA | SEQ ID NO: 2147 | AGGAACAGGACCCCTGCCAAG | SEQ ID NO: 4513 | CTACTAAATCATAGAGCCACTGG | SEQ ID NO: 6879 |
| rs1633088 | CCTCCTCAGGAAGGTCGGGACA | SEQ ID NO: 2148 | CCTCCTCAGGTAGGTCGGGACG | SEQ ID NO: 4514 | CAGACCTGTGTGTTAAACATTG | SEQ ID NO: 6880 |
| rs3871247 | TGAGGAAAAGAGAATGATGGGAAAA | SEQ ID NO: 2149 | TGAGGAAAAGAGAATGATGGGAAAG | SEQ ID NO: 4515 | GTTATTTTCCAACAGGAGTCTTAC | SEQ ID NO: 6881 |
| rs461338 | TGCCTCTGAGTCATTGTGTTTTTCAA | SEQ ID NO: 2150 | TGCCTCTGAGTCATTGTGTTTTTCAG | SEQ ID NO: 4516 | GTGATTTCTTTTCTGTAGCTTTTT | SEQ ID NO: 6882 |
| rs3807031 | GTTCTGGCAGTTGACTTTCCTGACA | SEQ ID NO: 2151 | GTTCTGGCAGTTGACTTTCCTGACC | SEQ ID NO: 4517 | ACTCCTGAAATCTGATACAAAC | SEQ ID NO: 6883 |
| rs6911709 | ACGTTGAAGCAGCCTTGCATTCT | SEQ ID NO: 2152 | ACGTTGAAGCAGCCTTGCATTCC | SEQ ID NO: 4518 | GGGATAAATTTCACTTTGTCGT | SEQ ID NO: 6884 |
| rs2524005 | AGGGGGCTTGACCTTCAAGGAA | SEQ ID NO: 2153 | AGGGGGCTTGACCTTCAAGGAG | SEQ ID NO: 4519 | TATGGGAAAGCTTAATAAAGGG | SEQ ID NO: 6885 |
| rs1736991 | GCATTCTGTGGGGCTGTCTAAAAC | SEQ ID NO: 2154 | GCATTCTGTGGGGCTGTCTAAAAG | SEQ ID NO: 4520 | TAATTGCCTCTCTAAGATAAAAAGG | SEQ ID NO: 6886 |
| rs4713422 | AGGGGAATGGGGGTGCTTAGAC | SEQ ID NO: 2155 | AGGGGAATGGGGGTGCTTAGAG | SEQ ID NO: 4521 | AGAGGAGGGTGAATCTAACAAA | SEQ ID NO: 6887 |
| rs6921921 | TCATGTTTTTTTGGCCACATGTACA | SEQ ID NO: 2156 | TCATGTTTTTTTGGCCACATGTACG | SEQ ID NO: 4522 | CTTATTTTGTGAAATGTCTCTTCA | SEQ ID NO: 6888 |
| rs7453137 | TTTTAGTCCCTCTGCTTCCCTCTTT | SEQ ID NO: 2157 | TTTTAGTCCCTCTGCTTCCCTCTTC | SEQ ID NO: 4523 | AATAATTTGTCAGGCCTTTTAAA | SEQ ID NO: 6889 |
| rs1801823 | GAAGCCTTTGCTTGGCCCTTA | SEQ ID NO: 2158 | GAAGCCTTTGCTTGGCCCTTG | SEQ ID NO: 4524 | ATGTTAGGATATGGCCAAGAAT | SEQ ID NO: 6890 |
| rs498240 | GCAGGCACATCAGAATAGGAGAGAT | SEQ ID NO: 2159 | GCAGGCACATCAGAATAGGAGAGAC | SEQ ID NO: 4525 | GATGGCTATATTTTGTAAGCCC | SEQ ID NO: 6891 |
| rs6906730 | CCCTGTGAAAATGAGATTGCATTCT | SEQ ID NO: 2160 | CCCTGTGAAAATGAGATTGCATTCC | SEQ ID NO: 4526 | TAAATCAGAATAGCACATTCACC | SEQ ID NO: 6892 |
| rs2057726 | GTGTTTCCTGCACTCATCTTGTGAT | SEQ ID NO: 2161 | GTGTTTCCTGCACTCATCTTGTGAC | SEQ ID NO: 4527 | GAGTTCTATTTGCTCCTCAGATG | SEQ ID NO: 6893 |
| rs2523989 | CTGCTTGGTCTTCAGGGAATCAAT | SEQ ID NO: 2162 | CTGCTTGGTCTTCAGGGAATCAAC | SEQ ID NO: 4528 | AGCTTCTTGAGATCGTTCAACT | SEQ ID NO: 6894 |
| rs2071788 | CCAACGGCTCTACCAAGATGATTATA | SEQ ID NO: 2163 | CCAACGGCTCTACCAAGATGATTATG | SEQ ID NO: 4529 | GGCATTTTAATAAGGATTACGT | SEQ ID NO: 6895 |
| rs4713214 | CCCAGGCAGAGTATTCAAAATTTTGT | SEQ ID NO: 2164 | CCCAGGCAGAGTATTCAAAATTTTGA | SEQ ID NO: 4530 | ACTAAAACAGCTCAGTGAGATACC | SEQ ID NO: 6896 |
| rs29273 | CTGAGCAGGGTCTTTGGAATCAG | SEQ ID NO: 2165 | CTGAGCAGGGTCTTTGGAATCAC | SEQ ID NO: 4531 | AATCTCATGTTGGCTTGTTACAT | SEQ ID NO: 6897 |
| rs2517912 | TCAGCCAACACATCTAGCTTAGCATA | SEQ ID NO: 2166 | TCAGCCAACACATCTAGCTTAGCATG | SEQ ID NO: 4532 | TGTCAGTAACTTTGGTTTGGATAC | SEQ ID NO: 6898 |
| rs1265156 | CCCTCCCATCTACCCACCCCA | SEQ ID NO: 2167 | CCCTCCCATCTACCCACCCCC | SEQ ID NO: 4533 | TTACTTGACATGGGAATGTAGAC | SEQ ID NO: 6899 |
| rs4386816 | CATTTGGGTGCGCTAAATCTTTATCT | SEQ ID NO: 2168 | CATTTGGGTGCGCTAAATCTTTATCC | SEQ ID NO: 4534 | AATAAATAAATGGAAACTTCCTTT | SEQ ID NO: 6900 |
| rs2075702 | CAGTGAATGCCCCATGTAAAAACAT | SEQ ID NO: 2169 | CAGTGAATGCCCCATGTAAAAACAC | SEQ ID NO: 4535 | ATGATAAAACAGCAAAGCACTG | SEQ ID NO: 6901 |
| rs1264616 | AGGTCAGAAGGGTGTTTGCTGTTAT | SEQ ID NO: 2170 | AGGTCAGAAGGGTGTTTGCTGTTAC | SEQ ID NO: 4536 | ACTCTTGCTCTCACTTCTACCTG | SEQ ID NO: 6902 |
| rs1419633 | TGATGCTTTGGCTCTTGGAGTATCA | SEQ ID NO: 217T | TGATGCTTTGGCTCTTGGAGTATCG | SEQ ID NO: 4537 | TGTCAACTCAGACAACTGTACTTG | SEQ ID NO: 6903 |
| rs389883 | GCTGCCAAAAAGCTGACTCTTCTTT | SEQ ID NO: 2172 | GCTGCCAAAAAGCTGACTCTTCTTG | SEQ ID NO: 4538 | TAATAAAATGACCCAAGTTTGTATT | SEQ ID NO: 6904 |
| rs2523921 | CCCTGGATTTGGAGATCTCTCCTACA | SEQ ID NO: 2173 | CCCTGGATTTGGAGATCTCTCCTACG | SEQ ID NO: 4539 | CTGCTTAAGCTTCTTCAGCTATC | SEQ ID NO: 6905 |
| rs209474 | CCAAATTAAACCCACCCTTCTAAGAA | SEQ ID NO: 2174 | CCAAATTAAACCCACCCTTCAAAGAG | SEQ ID NO: 4540 | AACCTCAGTCCCCTTATTATTG | SEQ ID NO: 6906 |
| rs2532921 | AACTGGGGCACCTGTTCAATTAGTG | SEQ ID NO: 2175 | AACTGGGGCACCTGTTCAATTAGTC | SEQ ID NO: 4541 | TGATGCCATACTCTGGTAAGAG | SEQ ID NO: 6907 |
| rs2207338 | TGGGTGAGGGGAGATTATATAGTGCA | SEQ ID NO: 2176 | TGGGTGAGGGGAGATTATATAGTGCC | SEQ ID NO: 4542 | ATGTTAAATTTTGCATCATGGTA | SEQ ID NO: 6908 |
| rs2844829 | AAAGTGCACAATGCAGTGACAATTT | SEQ ID NO: 2177 | AAAGTGCACAATGCAGTGACAATTC | SEQ ID NO: 4543 | TATGTTCACAATGTTATGTAACCA | SEQ ID NO: 6909 |
| rs1035798 | TCCACTGGCCTCATTTCCACAT | SEQ ID NO: 2178 | TCCACTGGCCTCATTTCCACAC | SEQ ID NO: 4544 | CAGAGTTTGAGAACCTTCACAAT | SEQ ID NO: 6910 |
| rs2857597 | AACCTCAAAGAATGCAGGCAGGT | SEQ ID NO: 2179 | AACCTCAAAGAATGCAGGCAGGA | SEQ ID NO: 4545 | AAAAACACATGTCCAAACAAG | SEQ ID NO: 6911 |
| rs2747421 | AGCCTGGGCTAGGTGTCTGCCG | SEQ ID NO: 2180 | AGCCTGGGCTAGGTGTCTGCCC | SEQ ID NO: 4546 | CTGTTCTACCCTGCTTCTAGAA | SEQ ID NO: 6912 |
| rs2246818 | GATTGCTTTGATGCTGGGTCAAA | SEQ ID NO: 2181 | GATTGCTTTGATGCTGGGTCAAG | SEQ ID NO: 4547 | CATTGAGACAGACCTCTCCTT | SEQ ID NO: 6913 |
| rs2855812 | GGTGGGCAGGTGACAGGGTA | SEQ ID NO: 2182 | GGTGGGCAGGTGACAGGGTC | SEQ ID NO: 4548 | CAAAGAGTAAGTCCATCTTTTCA | SEQ ID NO: 6914 |
| rs6457259 | GGAATGTTAAATGGTTCAGCCTCTGT | SEQ ID NO: 2183 | GGAATGTTAAATGGTTCAGCCTCTGC | SEQ ID NO: 4549 | GTAAACAGTTTGATGGTTCCTC | SEQ ID NO: 6915 |
| rs2071799 | CAGACACCAAGGGCTCTTATGAATCT | SEQ ID NO: 2184 | CAGACACCAAGGGCTCTTATGAATCC | SEQ ID NO: 4550 | ATCCTGAAAGGAAGGTAAGATT | SEQ ID NO: 6916 |
| rs7754054 | TGAGATTTGTGTGGGGACATAAAACG | SEQ ID NO: 2185 | TGAGATTTGTGTGGGGACATAAAACC | SEQ ID NO: 4551 | AACCATATCAGGCTCTATTCTGT | SEQ ID NO: 6917 |
| rs1049526 | TGATCTGGAGTTACCTGAGGCCAT | SEQ ID NO: 2186 | TGATCTGGAGTTACCTGAGGCCAC | SEQ ID NO: 4552 | GCTGCCCTATTCACTTCTAAG | SEQ ID NO: 6918 |
| rs2284191 | TGAGTGTGGCTCTTCCATAACTGTTA | SEQ ID NO: 2187 | TGAGTGTGGCTCTTCCATAACTGTTG | SEQ ID NO: 4553 | CTAGTTTTCTGGAAGTTAGGGAT | SEQ ID NO: 6919 |
| rs1655944 | ACAGAGCCTTGGGTGCTGCAGA | SEQ ID NO: 2188 | ACAGAGCCTTGGGTGCTGCAGG | SEQ ID NO: 4554 | AAAACAGTTTGAGACAGAGAAAG | SEQ ID NO: 6920 |
| rs7451258 | CCACTGCACCCAAACTTCCTTTG | SEQ ID NO: 2189 | CCACTGCACCCAAACTTCCTTTC | SEQ ID NO: 4555 | TTTTATTTAAAAACAGCAACAACA | SEQ ID NO: 6921 |
| rs2844665 | GGAGGGAAAGCCCTACCACCT | SEQ ID NO: 2190 | GGAGGGAAAGCCCTACCACCC | SEQ ID NO: 4556 | CCTACTGTTTCCTGAAGATTCC | SEQ ID NO: 6922 |
| rs3763364 | TGTTGCATAGGAAGGCTCTGGGT | SEQ ID NO: 2191 | TGTTGCATAGGAAGGCTCTGGGA | SEQ ID NO: 4557 | AGGAAGGATATTTAAAAACCTAATT | SEQ ID NO: 6923 |
| rs3128982 | CTGATCTCTGTTTCCTTTGCCGAT | SEQ ID NO: 2192 | CTGATCTCTGTTTCCTTTGCCGAC | SEQ ID NO: 4558 | AGACTGATTTTCTCTGCTTGG | SEQ ID NO: 6924 |
| rs6457358 | GTTTCACTTCTCCCAACCTGCGA | SEQ ID NO: 2193 | GTTTCACTTCTCCCAACCTGCGT | SEQ ID NO: 4559 | GGGTCCTTCTTCCTGAATACT | SEQ ID NO: 6925 |
| rs7758512 | GTTTGGACAGTGTGTGCCCAGAT | SEQ ID NO: 2194 | GTTTGGACAGTGTGTGCCCAGAG | SEQ ID NO: 4560 | CCACTTGGTGAGAAGAAGATT | SEQ ID NO: 6926 |
| rs3115673 | CAAATGTGTATGGAAGGGTGGACTA | SEQ ID NO: 2195 | CAAATGTGTATGGAAGGGTGGACTC | SEQ ID NO: 4561 | AAATGAACTACAGGAAAATACATG | SEQ ID NO: 6927 |
| rs7029 | CTTCCCCTTCCTGGGATCTGCT | SEQ ID NO: 2196 | CTTCCCCTTCCTGGGATCTGCC | SEQ ID NO: 4562 | AGATGCAGATCCTGAAGTTTTT | SEQ ID NO: 6928 |
| rs1041885 | CACCAAAAATTCCACCCAAGATCT | SEQ ID NO: 2197 | CACCAAAAATTCCACCCAAGATCA | SEQ ID NO: 4563 | CTAAATAGTTTATTGTGTTCAGAAA | SEQ ID NO: 6929 |
| rs259939 | CCCAGCCCAGACATTTCTCCTA | SEQ ID NO: 2198 | CCCAGCCCAGACATTTCTCCTG | SEQ ID NO: 4564 | ATTTCCAACTTGCATATCCAT | SEQ ID NO: 6930 |
| rs3093993 | TGTGACAGTAACAGAAAGTGCCCAGA | SEQ ID NO: 2199 | TGTGACAGTAACAGAAAGTGCCCAGC | SEQ ID NO: 4565 | GGGTCTCTGACACTTAGTAATGT | SEQ ID NO: 6931 |
| rs6457595 | GACCCTCATCAGAAATCCTGACGT | SEQ ID NO: 2200 | GACCCTCATCAGAAATCCTGACGA | SEQ ID NO: 4566 | CTAGCCCTCTTCTGTTTTTTC | SEQ ID NO: 6932 |
| rs3128844 | TGCTTTAGTGAGCTCAGCTTCTCTGG | SEQ ID NO: 2201 | TGCTTTAGTGAGCTCAGCTTCTCTGC | SEQ ID NO: 4567 | AACTTCATCTGTGAAGCTGTCT | SEQ ID NO: 6933 |
| rs3094212 | ATGGAGAAGGGGCAGGAACAAA | SEQ ID NO: 2202 | ATGGAGAAGGGGCAGGAACAAG | SEQ ID NO: 4568 | AGGTCTAAAAGAAAGGACCCT | SEQ ID NO: 6934 |
| rs1264695 | CAGGTTGGAAGACCTCCCCAA | SEQ ID NO: 2203 | CAGGTTGGAAGACCTCCCCAG | SEQ ID NO: 4569 | TTTAAACCTTGCTACAAAGTATTC | SEQ ID NO: 6935 |
| rs2516393 | CGTGGGGTTCATGATTTAGATCACAT | SEQ ID NO: 2204 | CGTGGGGTTCATGATTTAGATCACAG | SEQ ID NO: 4570 | ATTGAAGTCATTTATTATCGGC | SEQ ID NO: 6936 |
| rs209146 | TCGCCTTCATATTCAATCTGTGTTCT | SEQ ID NO: 2205 | TCGCCTTCATATTCAATCTGTGTTCC | SEQ ID NO: 4571 | GCTAGACCAAACTGTTCTCAACT | SEQ ID NO: 6937 |
| rs4713243 | CATCAAAGACTGGAGCGACGTTC | SEQ ID NO: 2206 | CATCAAAGACTGGAGCGACGTTG | SEQ ID NO: 4572 | CTGAAATGATACAAGACCAGC | SEQ ID NO: 6938 |
| rs532385 | TGGGAAATGACCCTTTTTCCTACAA | SEQ ID NO: 2207 | TGGGAAATGACCCTTTTTCCTACAG | SEQ ID NO: 4573 | ATTTCATCAAATAGAGATTCATTTT | SEQ ID NO: 6939 |
| rs1610628 | CCCTAGTGAAAGCTACAGATTTGCCT | SEQ ID NO: 2208 | CCCTAGTGAAAGCTACAGATTTGCCG | SEQ ID NO: 4574 | AGTTCTAGAAACTGCTCCCTTC | SEQ ID NO: 6940 |
| rs8111 | TGGGAATTTAGTCCCCAGGTGGA | SEQ ID NO: 2209 | TGGGAATTTAGTCCCCAGGTGGG | SEQ ID NO: 4575 | CAAGGGAAGTTTTTTCATTTT | SEQ ID NO: 6941 |
| rs2242660 | TGATGAGGGAAGGGCATATGCTTA | SEQ ID NO: 2210 | TGATGAGGGAAGGGCATATGCTTG | SEQ ID NO: 4576 | CACTGCTGAGATAGCTCTGTT | SEQ ID NO: 6942 |
| rs3115592 | TGATGTGGTAGGTGGAAATGGTTAAA | SEQ ID NO: 2211 | TGATGTGGTAGGTGGAAATGGTTAAC | SEQ ID NO: 4577 | TCAATCTAGGAACAAGATTTTTC | SEQ ID NO: 6943 |
| rs3135029 | ACGTGATCTGGCCCTTGCCA | SEQ ID NO: 2212 | ACGTGATCTGGCCCTTGCCC | SEQ ID NO: 4578 | AATTTGTAGCTTATCACAACATCC | SEQ ID NO: 6944 |
| rs3869109 | CCGCTCTGTAAACACCAACTCCCA | SEQ ID NO: 2213 | CCGCTCTGTAAACACCAACTCCCG | SEQ ID NO: 4579 | CAGTTCCAATCTGTAACTTGC | SEQ ID NO: 6945 |
| rs2066951 | GATTTGATGCAGCAGCCTTATGAT | SEQ ID NO: 2214 | GATTTGATGCAGCAGCCTTATGAG | SEQ ID NO: 4580 | CAGAACAGGCTGGGTTACTAT | SEQ ID NO: 6946 |
| rs2282851 | GCACAGTCCCTCCCACGTCT | SEQ ID NO: 2215 | GCACAGTCCCTCCCACGTCC | SEQ ID NO: 4581 | AGCCTAGAAAAGCTTCTGACTC | SEQ ID NO: 6947 |
| rs2517713 | CCAGGGATTTCTGGCTCGCT | SEQ ID NO: 2216 | CCAGGGATTTCTGGCTCGCG | SEQ ID NO: 4582 | CTCATATTCCCTTACAGGTGTG | SEQ ID NO: 6948 |
| rs7770505 | AGTGGAGACGCAATCTCCCTTGA | SEQ ID NO: 2217 | AGTGGAGACGCAATCTCCCTTGG | SEQ ID NO: 4583 | AGACGTTAGTCTCCATCTCTAACG | SEQ ID NO: 6949 |
| rs3117294 | CTCTCCCCAAGCAGAACCCATTT | SEQ ID NO: 2218 | CTCTCCCCAAGCAGAACCCATTG | SEQ ID NO: 4584 | TCCTACACAGGTGTCATCAGA | SEQ ID NO: 6950 |
| rs2857218 | TCCTAACACCGTGGTAGAATCCTTC | SEQ ID NO: 2219 | TCCTAACACCGTGGTAGAATCCTTG | SEQ ID NO: 4585 | TGAAATAGATTAAATTCCCCAAG | SEQ ID NO: 6951 |
| rs2242656 | CCCAAAACAGAACAGGCTGAAATA | SEQ ID NO: 2220 | CCCAAAACAGAACAGGCTGAAATG | SEQ ID NO: 4586 | AGATAACTCTTTCCCTCCCTG | SEQ ID NO: 6952 |
| rs2275454 | GAGGAACCTCCTAGTCTTGGAACCTT | SEQ ID NO: 2221 | GAGGAACCTCCTAGTCTTGGAACCTC | SEQ ID NO: 4587 | AGAAGTTTCCAGAAATGTGTGA | SEQ ID NO: 6953 |
| rs3130050 | CATTGGTCAGGTCTATGCTGTGTTT | SEQ ID NO: 2222 | CATTGGTCAGGTCTATGCTGTGTTC | SEQ ID NO: 4588 | TAAAGGGTAGAAATCAGAACCC | SEQ ID NO: 6954 |
| rs7745413 | CAATCTGTACCTGCAGAAGCCTGATAT | SEQ ID NO: 2223 | CAATCTGTACCTGCAGAAGCCTGATAC | SEQ ID NO: 4589 | GCTAAAGAATGAATGGAATTACTC | SEQ ID NO: 6955 |
| rs2894066 | CCCACTCCCACCTTGTTCTACCT | SEQ ID NO: 2224 | CCCACTCCCACCTTGTTCTACCC | SEQ ID NO: 4590 | ACTCATCTATTTTGTTCTACCTTTT | SEQ ID NO: 6956 |
| rs3213469 | CCACAGGAGGCATCCTGAAGGG | SEQ ID NO: 2225 | CCACAGGAGGCATCCTGAAGGC | SEQ ID NO: 4591 | ACAGGGACTCTGTCTTCACTT | SEQ ID NO: 6957 |
| rs406936 | GTGGCCACAGGAACATGGACAA | SEQ ID NO: 2226 | GTGGCCACAGGAACATGGACAG | SEQ ID NO: 4592 | TGTTGAAACACTAGGTGGAGAA | SEQ ID NO: 6958 |
| rs3916765 | GGGACCACACTCTTGCCTTCCTAA | SEQ ID NO: 2227 | GGGACCACACTCTTGCCTTCCTAG | SEQ ID NO: 4593 | ACTCACGTACCATTTTCAAGC | SEQ ID NO: 6959 |
| rs3873257 | GTGATCAGAATGAGTCAGGGTGGT | SEQ ID NO: 2228 | GTGATCAGAATGAGTCAGGGTGGA | SEQ ID NO: 4594 | CAGGTAACTGGAATGAGTCAG | SEQ ID NO: 6960 |
| rs453658 | CAGCAGAAAGATTTCTGTCCATCACA | SEQ ID NO: 2229 | CAGCAGAAAGATTTCTGTCCATCACG | SEQ ID NO: 4595 | AAACTTTCATCCATTACATAACC | SEQ ID NO: 6961 |
| rs660594 | CCAGTGACACCAAGGCACTCTACAA | SEQ ID NO: 2230 | CCAGTGACACCAAGGCACTCTACAG | SEQ ID NO: 4596 | GCAAGTATTGCTTTGTTTTCC | SEQ ID NO: 6962 |
| rs1008403 | AAAACAGAGAGAGAGGTGGGAGGAA | SEQ ID NO: 2231 | AAAACAGAGAGAGAGGTGGGAGGAG | SEQ ID NO: 4597 | GGAGAAGAGTATTCTAGGAGGAA | SEQ ID NO: 6963 |
| rs763009 | TTGAGAGTTCTCTGGGAAGCATAGAA | SEQ ID NO: 2232 | TTGAGAGTTCTCTGGGAAGCATAGAG | SEQ ID NO: 4598 | ATTTATTCTGCTCTTGATGAGG | SEQ ID NO: 6964 |
| rs3130649 | CAGAGGACATCACTCCAGGACTTGA | SEQ ID NO: 2233 | CAGAGGACATCACTCCAGGACTTGT | SEQ ID NO: 4599 | TGTAGCCTCTGAAAGTAGAGGC | SEQ ID NO: 6965 |
| rs7752270 | GAATTTAGTGAAATCACCAGAGCCTGA | SEQ ID NO: 2234 | GAATTTAGTGAAATCACCAGAGCCTGG | SEQ ID NO: 4600 | AAATAGGAAAATGAGTTCAAAGG | SEQ ID NO: 6966 |
| rs659445 | TTGTGGCATGGCCTAGAAAACAA | SEQ ID NO: 2235 | TTGTGGCATGGCCTAGATAACAG | SEQ ID NO: 4601 | CAAGCAAAAGGCAAGATAAGA | SEQ ID NO: 6967 |
| rs7753474 | GCCAATGTGACAAGCTCTTTGTTTT | SEQ ID NO: 2236 | GCCAATGTGACAAGCTCTTTGTTTC | SEQ ID NO: 4602 | GTTGGAGTGTTTGCACAATTTA | SEQ ID NO: 6968 |
| rs3130762 | CCCTGTGGTTCAGCTTCTTGAACC | SEQ ID NO: 2237 | CCCTGTGGTTCAGCTTCTTGAACG | SEQ ID NO: 4603 | TGTGATAGACACACCTGCAAC | SEQ ID NO: 6969 |
| rs3094127 | CTGAGAAAAGCAGTGATATGCCCTA | SEQ ID NO: 2238 | CTGAGAAAAGCAGTGATATGCCCTG | SEQ ID NO: 4604 | AATTAATTAACTGTCAATAGGCTG | SEQ ID NO: 6970 |
| rs7754598 | TTTGCATTATGAAAATCCAGGTCAA | SEQ ID NO: 2239 | TTTGCATTATGAAAATCCAGGTCAG | SEQ ID NO: 4605 | TCTTCTTTCTTCTCCCAATTGT | SEQ ID NO: 6971 |
| rs7774255 | TGTCAAGTAACTCAATTCCTCAGCAA | SEQ ID NO: 2240 | TGTCAAGTAACTCAATTCCTCAGCAT | SEQ ID NO: 4606 | GAGGTACTGAAATGAGATGAATTT | SEQ ID NO: 6972 |
| rs465506 | AGGCTTCAATGGAGCGCAAAAA | SEQ ID NO: 2241 | AGGCTTCAATGGAGCGCAAAAG | SEQ ID NO: 4607 | TCCTAAATTTGGTGAGAAATG | SEQ ID NO: 6973 |
| rs2853961 | ATTCGGGGTCCTTGACTTCCCA | SEQ ID NO: 2242 | ATTCGGGGTCCTTGACTTCCCG | SEQ ID NO: 4608 | AACAACAGTAAGAGTAAGCAAGTAA | SEQ ID NO: 6974 |
| rs3815101 | CCTCGCCTTTTACCCTTCCCTA | SEQ ID NO: 2243 | CCTCGCCTTTTACCCTTCCCTG | SEQ ID NO: 4609 | CTCCTTTCCTCTCCTCAGAGAT | SEQ ID NO: 6975 |
| rs2517892 | TGAAAATGGACAGACTTAAAACCCAAT | SEQ ID NO: 2244 | TGAAAATGGACAGACTTAAACCCAAC | SEQ ID NO: 4610 | AGGTCAACAATGACATTAAACG | SEQ ID NO: 6976 |
| rs2187689 | GGAGTACAGTGACCTGAACATGGCTT | SEQ ID NO: 2245 | GGAGTACAGTGACCTGAACATGGCTC | SEQ ID NO: 4611 | CTGTATCCCTAACCTGCTGTG | SEQ ID NO: 6977 |
| rs6901092 | AGAGGCTCTAGTAGCAGCTTTGCAA | SEQ ID NO: 2246 | AGAGGCTCTAGTAGCAGCTTTGCAG | SEQ ID NO: 4612 | CTTGCAAAGTCCAAGATTTCT | SEQ ID NO: 6978 |
| rs2857605 | CAGTTGGCATGGTAGAACTTCTAGGAT | SEQ ID NO: 2247 | CAGTTGGCATGGTAGAACTTCTAGGAC | SEQ ID NO: 4613 | CTGAAATAGTTTGTGGAGACACA | SEQ ID NO: 6979 |
| rs2516676 | CGTGGGGTAGGAGAAACAGGTATAACC | SEQ ID NO: 2248 | CGTGGGGTAGGAGAAACAGGTATAACG | SEQ ID NO: 4614 | TTGACTAGAGAATGGATACTTGAG | SEQ ID NO: 6980 |
| rs6922756 | GCTCAGGAGTGAAGCTACAGAGCTTT | SEQ ID NO: 2249 | GCTCAGGAGTGAAGCTACAGAGCTTG | SEQ ID NO: 4615 | CGGTCAGTGTTATAGCTCTTAAG | SEQ ID NO: 6981 |
| rs2074475 | AAAGGAAAAGAGGCTAGAAGGGAAGA | SEQ ID NO: 2250 | AAAGGAAAAGAGGCTAGAAGGGAAGG | SEQ ID NO: 4616 | AAAAAAAGGATCAACGAA4ATA | SEQ ID ND: 6982 |
| rs1264432 | TTTTAACTTCTGTGATCCCTGTAGCCA | SEQ ID NO: 2251 | TTTTAACTTCTGTGATCCCTGTAGCCG | SEQ ID NO: 4617 | TCATATGTGCTGTTAATGGAATT | SEQ ID NO: 6983 |
| rs2267633 | GGGGAGCCACATGTGAGAAAGTATA | SEQ ID NO: 2252 | GGGGAGCCACATGTGAGAAAGTATG | SEQ ID NO: 4618 | AAGGGCAAGTAAGATGGAAAG | SEQ ID NO: 6984 |
| rs2517819 | GAGGGTCCGCCGTGCTCTT | SEQ ID NO: 2253 | GAGGGTCCGCCGTGCTCTC | SEQ ID NO: 4619 | GACACAATTAAGGGATGAAATCT | SEQ ID NO: 6985 |
| rs3130637 | CACTTTCTATCTCATTTCATGAGGCCA | SEQ ID NO: 2254 | CACTTTCTATCTCATTTCATGAGGCCG | SEQ ID NO: 4620 | GATTCCATGAGGGAATACTTTC | SEQ ID NO: 6986 |
| rs3116837 | TCTGAGGCCTTATTGTAACAAAATGGT | SEQ ID NO: 2255 | TCTGAGGCCTTATTGTAACAAAATGGC | SEQ ID NO: 4621 | ATCTTTTTATCAGACCCAATTATT | SEQ ID NO: 6987 |
| rs3793125 | CTCACATGCAAGGGGAGGGA | SEQ ID NO: 2256 | CTCACATGCAAGGGGAGGGG | SEQ ID NO: 4622 | CTGAGTCAGGATAGAGATGCCT | SEQ ID NO: 6988 |
| rs757257 | TCTCATGTGGTGGTTGAGAAAACTGA | SEQ ID NO: 2257 | TCTCATGTGGTGGTTGAGAAAACTGG | SEQ ID NO: 4623 | ACACAGTTAAATGAACTTGTCTAAC | SEQ ID NO: 6989 |
| rs3117038 | TACCTGGAGGCTGCCATGACACT | SEQ ID NO: 2258 | TACCTGGAGGCTGCCATGACACC | SEQ ID NO: 4624 | GTAAACGTGGTGACAAGGAAA | SEQ ID NO: 6990 |
| rs2523589 | TTCTAGAATGTAATGGACGTGCAGTCT | SEQ ID NO: 2259 | TTCTAGAATGTAATGGACGTGCAGTCG | SEQ ID NO: 4625 | ATGTTATGTAGTCCTTCGTTTGG | SEQ ID NO: 6991 |
| rs2747479 | GTTTTTCAAATCTTGCTAGTGAGCCT | SEQ ID NO: 2260 | GTTTTTCAAATCTTGCTAGTGAGCCG | SEQ ID NO: 4626 | TTGCTAATTAAAAGTGATCTTCTG | SEQ ID NO: 6992 |
| rs3130244 | TCTCTGAGGAGAGCTTGGGAAGGA | SEQ ID NO: 2261 | TCTCTGAGGAGAGCTTGGGAAGGC | SEQ ID NO: 4627 | TGTTCATGGTCTCAGGCTCTAT | SEQ ID NO: 6993 |
| rs7357041 | CCAGACGTTTATCTTGCTGAGGCTT | SEQ ID NO: 2262 | CCAGACGTTTATCTTGCTGAGGCTC | SEQ ID NO: 4628 | GTGCTCTCATCCAGAGAATG | SEQ ID NO: 6994 |
| rs4713504 | TTAAGAGGGAGCCAAAGTGAGGTAC | SEQ ID NO: 2263 | TTAAGAGGGAGCCAAAGTGAGGTAG | SEQ ID NO: 4629 | CAAGAGAGGGATCCTTCTTTC | SEQ ID NO: 6995 |
| rs2187580 | CCCAAATGCCTATCAATGAAAGACTAGA | SEQ ID NO: 2264 | CCCAAATGCCTATCAATGAAAGACTAGG | SEQ ID NO: 4630 | AAAGAAAATGTAGTATGCAGCC | SEQ ID NO: 6996 |
| rs3132945 | GGACAAGAAATGCCACATTTTAAAAAT | SEQ ID NO: 2265 | GGACAAGAAATGCCACATTTTAAAAAC | SEQ ID NO: 4631 | AAAATTATCAAACTGGATTAAATGG | SEQ ID NO: 6997 |
| rs3998751 | GAAACTGTGGGAGATGATGAATATTTGT | SEQ ID NO: 2266 | GAAACTGTGGGAGATGATGAATATTTGC | SEQ ID NO: 4632 | GTTTTGAGCTGCTAAGTTTTACA | SEQ ID NO: 6998 |
| rs2860580 | AAGCAAACCCGTCCTTCTTCAT | SEQ ID NO: 2267 | AAGCAAACCCGTCCTTCTTCAC | SEQ ID NO: 4633 | TGGTGACAGGAGAGAGAAATG | SEQ ID NO: 6999 |
| rs7757916 | CTTGGGGGAAGCATCAGGAGATA | SEQ ID NO: 2268 | CTTGGGGGAAGCATCAGGAGATG | SEQ ID NO: 4634 | ACTTGAAAAAACTCTTTTTACTAAGA | SEQ ID NO: 7000 |
| rs3130014 | TGAATTTGTCTAGGTGTTAGATTGGCT | SEQ ID NO: 2269 | TGAATTTGTCTAGGTGTTAGATTGGCC | SEQ ID NO: 4635 | CAGTTCTCTACCACTTCCTGTTA | SEQ ID NO: 7001 |
| rs3830076 | ACTGGGTACTACATCTCCCAGGCA | SEQ ID NO: 2270 | ACTGGGTACTACATCTCCCAGGCG | SEQ ID NO: 4636 | TTTATCACTGGAGCCTGTTTG | SEQ ID NO: 7002 |
| rs2158280 | AACAAATTTGATAAAATCCAACACCCA | SEQ ID NO: 2271 | AACAAATTTGATAAAATCCAACACCCG | SEQ ID NO: 4637 | TTATGATAAAAACTCTCAGCAAGC | SEQ ID NO: 7003 |
| rs1233391 | CCGCCTGGACACCGAGCTT | SEQ ID NO: 2272 | CCGCCTGGACACCGAGCTC | SEQ ID NO: 4638 | TGAAGTTAGCTGGAAGTACCAG | SEQ ID NO: 7004 |
| rs2844477 | AATCCATGAGGTTCACATGGACTTAT | SEQ ID NO: 2273 | AATCCATGAGGTTCACATGGACTTAC | SEQ ID NO: 4639 | GTTACACAAATTAGAAACAAATGTT | SEQ ID NO: 7005 |
| rs7453097 | GAGCGAAACCGCCTCTCAAACT | SEQ ID NO: 2274 | GAGCGAAACCGCCTCTCAAACA | SEQ ID NO: 4640 | ACAAAAAAAAACTTTGGGAGG | SEQ ID NO: 7006 |
| rs3130816 | CTCTCTCTCCCTCGTGAGAAAGAA | SEQ ID NO: 2275 | CTCTCTCTCCCTCGTGAGAAAGAG | SEQ ID NO: 4641 | TTTTTGAAAGGGAAACAACTG | SEQ ID NO: 7007 |
| rs4151648 | CTCAGCCAGGGCTGCATGCA | SEQ ID NO: 2276 | CTCAGCCAGGGCTGCATGCG | SEQ ID NO: 4642 | AAGAGATTGATGTGAAAGTCTCG | SEQ ID NO: 7008 |
| rs3131090 | TCTTTGAGACTCAAATTTGCCATTTA | SEQ ID NO: 2277 | TCTTTGAGACTCAAATTTGCCATTTG | SEQ ID NO: 4643 | TAGTGCGTGCATTTAGACAAG | SEQ ID NO: 7009 |
| rs1063318 | ACGTCGCTGTCGAAGCGCA | SEQ ID NO: 2278 | ACGTCGCTGTCGAAGCGCG | SEQ ID NO: 4644 | GTACTCCTCTCGGTTATAGATGTA | SEQ ID NO: 7010 |
| rs3130660 | CAAAACATTTTCATCAACTGATCAACAA | SEQ ID NO: 2279 | CAAAACATTTTCATCAACTGATCAACAT | SEQ ID NO: 4645 | GAGCCTTGCTTTATATGTGTTT | SEQ ID NO: 7011 |
| rs1264549 | GTCAAAGATCAAGGCCTGGGAAA | SEQ ID NO: 2280 | GTCAAAGATCAAGGCCTGGGAAG | SEQ ID NO: 4646 | GTCAGTGTATGGTGAGGGCT | SEQ ID NO: 7012 |
| rs2299851 | CATCTTATATAAGAGCCAACATGTGCAT | SEQ ID NO: 2281 | CATCTTATATAAGAGCCAACATGTGCAC | SEQ ID NO: 4647 | CACTAGGTCCTGAAGATTTGTATC | SEQ ID NO: 7013 |
| rs2844682 | TCATGACCATCTCTATGGCCAATT | SEQ ID NO: 2282 | TCATGACCATCTCTATGGCCAATC | SEQ ID NO: 4648 | CTTGGAGACCTCAGAGAAGC | SEQ ID NO: 7014 |
| rs2051625 | TTTCCTAATGGCCCTGATCCTGTT | SEQ ID NO: 2283 | TTTCCTAATGGCCCTGATCCTGTC | SEQ ID NO: 4649 | GCTTCTTCTCCTTCCGAGAT | SEQ ID NO: 7015 |
| rs2178899 | TGTCCCTTAATCTTGTGTGAACTTTTTT | SEQ ID NO: 2284 | TGTCCCTTAATCTTGTGTGAACTTTTTA | SEQ ID NO: 4650 | AATTAATACTTCCTTGGAACACTG | SEQ ID NO: 7016 |
| rs3130389 | GGAGAGTGATCTATTGGTTAGGAGCACA | SEQ ID NO: 2285 | GGAGAGTGATCTATTGGTTAGGAGCACG | SEQ ID NO: 4651 | AATAAAAGATATTGGAAATATTCGA | SEQ ID NO: 7017 |
| rs3749981 | TTGGGGTTTTGAGCCGCAGTA | SEQ ID NO: 2286 | TTGGGGTTTTGAGCCGCAGTG | SEQ ID NO: 4652 | CTGCCTCTGTTCAAGTATCCA | SEQ ID NO: 7018 |
| rs1233386 | TTATTTTAAGGAAGTGAAACCCCTTCA | SEQ ID NO: 2287 | TTATTTTAAGGAAGTGAAACCCCTTCG | SEQ ID NO: 4653 | CTGGGGGATCATTTAGATATAGT | SEQ ID NO: 7019 |
| rs2142234 | CCCGGAGCAGCCCTGATT | SEQ ID NO: 2288 | CCCGGAGCAGCCCTGATC | SEQ ID NO: 4654 | GTGAGAGGAGAGAAGACCAAG | SEQ ID NO: 7020 |
| rs2747419 | TGACAGTGTTGAAAGATTCCAGTTAAA | SEQ ID NO: 2289 | TGACAGTGTTGAAAGATTCCAGTTAAC | SEQ ID NO: 4655 | TTTTATTTGCTTCTAATTTGAAAA | SEQ ID NO: 7021 |
| rs356971 | GGAAGTTGTGGTCTGCTATTGGTTATAAT | SEQ ID NO: 2290 | GGAAGTTGTGGTCTGCTATTGGTTATAAG | SEQ ID NO: 4656 | AGTCACAGATCATTATGCTTTCT | SEQ ID NO: 7022 |
| rs1079541 | GCCAGTGATTATTCCACTCTCTACTGA | SEQ ID NO: 2291 | GCCAGTGATTATTCCACTCTCTACTGC | SEQ ID NO: 4657 | TTTAATTGGAGATCTACATTAAGCT | SEQ ID NO: 7023 |
| rs2273192 | GCCTGCTGCCCAGCCACT | SEQ ID NO: 2292 | GCCTGCTGCCCAGCCACC | SEQ ID NO: 4658 | CACCTGCTAGTCTTCGATGTAG | SEQ ID NO: 7024 |
| rs1015466 | AGAAGAGAACTAAATGGACAGAGGGAT | SEQ ID NO: 2293 | AGAAGAGAACTAAATGGACAGAGGGAA | SEQ ID NO: 4659 | CTCAAATTTTTTTGAGATTAAAATT | SEQ ID NO: 7025 |
| rs4947324 | GAAAAGACTGTGGTCCGGTGGA | SEQ ID NO: 2294 | GAAAAGACTGTGGTCCGGTGGG | SEQ ID NO: 4660 | CCAGGTTTCAGGGCTTATTT | SEQ ID NO: 7026 |
| rs2071295 | TTAGTTCTCCCGGGCCAGCCA | SEQ ID NO: 2295 | TTAGTTCTCCCGGGCCAGCCG | SEQ ID NO: 4661 | TGCAGAATAAGAAAGGGAAC | SEQ ID NO: 7027 |
| rs3130010 | AGGCCATCGCCAATCATTGTATAT | SEQ ID NO: 2296 | AGGCCATCGCCAATCATTGTATAC | SEQ ID NO: 4662 | ACAAATGCTCCTTCTGGGATTA | SEQ ID NO: 7028 |
| rs2517424 | GAGTTGTCTGCATTTCCCCCAA | SEQ ID NO: 2297 | GAGTTGTCTGCATTTCCCCCAT | SEQ ID NO: 4663 | AATGACGAGAAGCTTCCTG | SEQ ID NO: 7029 |
| rs3093986 | GCCAACTTTCAATGTTAATTAGTTGTGGT | SEQ ID NO: 2298 | GCCAACTTTCAATGTTAATTAGTTGTGGA | SEQ ID NO: 4664 | TGTTTAACCATATACTGCATAGTTT | SEQ ID NO: 7030 |
| rs2006752 | AGTCATTTTTCCACATCATTTGACTAT | SEQ ID NO: 2299 | AGTCATTTTTCCACATCATTTGACTAC | SEQ ID NO: 4665 | ACTGTCAGTTTAAATTGCTCTAGG | SEQ ID NO: 7031 |
| rs2530699 | TCAACATGCTCCCTTAAGTAATTCTGAT | SEQ ID NO: 2300 | TCAACATGCTGCCTTAAGTAATTCTGAA | SEQ ID NO: 4666 | TAAGTGTGTTCTGAATATTATTCTGA | SEQ ID NO: 7032 |
| rs707917 | CAGCCCTCAGGTGAGTGGGAC | SEQ ID NO: 2301 | CAGCCCTCAGGTGAGTGGGAG | SEQ ID NO: 4667 | CCTTCAAGAAATCCACAGC | SEQ ID NO: 7033 |
| rs6531 | GAACATCAATGGATCGGTGTGAA | SEQ ID NO: 2302 | GAACATCAATGGATCGGTGTGAG | SEQ ID NO: 4668 | AGGAGGCAATGAGGAGTTC | SEQ ID NO: 7034 |
| rs2206042 | CAGCTCACAAAACAGAATAGTTCAGTA | SEQ ID NO: 2303 | CAGCTCACAAAACAGAATAGTTCAGTC | SEQ ID NO: 4669 | CACATTTGTTGCTCTTTTTATTAT | SEQ ID NO: 7035 |
| rs6457452 | AGCTGCTGCGAGGGTCCGT | SEQ ID NO: 2304 | AGCTGCTGCGAGGGTCCGC | SEQ ID NO: 4670 | TCGTCTTTCGAGAGTGACTC | SEQ ID NO: 7036 |
| rs1362064 | CACCAATATCATCCCCCCAAAATT | SEQ ID NO: 2305 | CACCAATATCATCCCCCCAAAATG | SEQ ID NO: 4671 | ATTATAGGTATGAGCCATTCCAC | SEQ ID NO: 7037 |
| rs4424066 | AAAGTGGACACACCATGACTGGAA | SEQ ID NO: 2306 | AAAGTGGACACACCATGACTGGAG | SEQ ID NO: 4672 | AAGAACAAGCAATAACGTAACAG | SEQ ID NO: 7038 |
| rs3094110 | CCCTCCTACCCCAACTGCTAGAAA | SEQ ID NO: 2307 | CCCTCCTACCCCAACTGCTAGAAG | SEQ ID NO: 4673 | GAGGGAGAGATACAGATGAAATAA | SEQ ID NO: 7039 |
| rs2242668 | CCTGTTCCAACAAGTCTGTTGGGA | SEQ ID NO: 2308 | CCTGTTCCAACAAGTCTGTTGGGG | SEQ ID NO: 4674 | GGAACCTCTTTAATTTGAGAAAT | SEQ ID NO: 7040 |
| rs6910451 | CGTAGGCACCCAAGGGAATCTA | SEQ ID NO: 2309 | CGTAGGCACCCAAGGGAATCTG | SEQ ID NO: 4675 | TGTTCTGTGGTTTGCGAAAT | SEQ ID NO: 7041 |
| rs3823355 | CCCACCGGGGTCAAGGAACT | SEQ ID NO: 2310 | CCCACCGGGGTCAAGGAACC | SEQ ID NO: 4676 | AAAGAGGATGAGGGTCAAGG | SEQ ID NO: 7042 |
| rs3130667 | CCAGCTGCTTGCCCAGGTCA | SEQ ID NO: 2311 | CCAGCTGCTTGCCCAGGTCG | SEQ ID NO: 4677 | TGGGGACCATTATGAGTCAG | SEQ ID NO: 7043 |
| rs2071293 | CTTGCTGGAGATGCTGCAGAGA | SEQ ID NO: 2312 | CTTGCTGGAGATGCTGCAGAGG | SEQ ID NO: 4678 | CTCAGTGCCCAGTGTCAAG | SEQ ID NO: 7044 |
| rs1063478 | CCCAAATCCTTCCACAGGGAT | SEQ ID NO: 2313 | CCCAAATCCTTCCACAGGGAC | SEQ ID NO: 4679 | GAATGATGCTGCCAGTTCAC | SEQ ID NO: 7045 |
| rs2242654 | TGTTATCACAACTGTGCAGCCTCCT | SEQ ID NO: 2314 | TGTTATCACAACTGTGCAGCCTCCC | SEQ ID NO: 4680 | TTCTTCAGTTCTTCCTGCATAC | SEQ ID NO: 7046 |
| rs2394994 | CAAATGGCGGCTCCATCTTCT | SEQ ID NO: 2315 | CAAATGGCGGCTCCATCTTCA | SEQ ID NO: 4681 | TTTTCCTTTCCAACCACGT | SEQ ID NO: 7047 |
| rs3130805 | TGCATGATTATATGTGTTTGCAAAAAA | SEQ ID NO: 2316 | TGCATGATTATATGTGTTTGCAAAAAG | SEQ ID NO: 4682 | CAAGTAATTATATGCTAAAAAAGAGA | SEQ ID NO: 7048 |
| rs2269429 | GCCCGGTGTCCACCGTGA | SEQ ID NO: 2317 | GCCCGGTGTCCACCGTGG | SEQ ID NO: 4683 | CGTGACTGGTGAGTAGTGCTT | SEQ ID NO: 7049 |
| rs3132587 | ACCAGTAACGGTCGCGACCCA | SEQ ID NO: 2318 | ACCAGTAACGGTCGCGACCCG | SEQ ID NO: 4684 | GAAAAAGAGCTTATTTGCTGATT | SEQ ID NO: 7050 |
| rs2300825 | TTTCTAGACAGTTGCCTTATCAAATACCA | SEQ ID NO: 2319 | TTTCTAGACAGTTGCCTTATCAAATACCG | SEQ ID NO: 4685 | CTATGTTACGTCATTTAATCTCACA | SEQ ID NO: 7051 |
| rs7744304 | CAGCCAACAAACATAGGATAAAATTCT | SEQ ID NO: 2320 | CAGCCAACAAACATAGGAAAAAATTCG | SEQ ID NO: 4686 | AACAGCACTAATTATTAGAGATATGC | SEQ ID NO: 7052 |
| rs1233388 | AAATTAATTAGGATGACACATGATGGATA | SEQ ID NO: 2321 | AAATTAATTAGGATGACACATGATGGATG | SEQ ID NO: 4687 | ATAAGAAACAATTGGCTATTGTT | SEQ ID NO: 7053 |
| rs4711279 | ACTTTCTTCCGCCTGGCCAGAG | SEQ ID NO: 2322 | ACTTTCTTCCGCCTGGCCAGAC | SEQ ID NO: 4688 | TTTTGTTTTTCAATTTTTTCAGAAA | SEQ ID NO: 7054 |
| rs6915800 | CCCATCCTTACCGGAGTGTGCA | SEQ ID NO: 2323 | CCCATCCTTACCGGAGTGTGCG | SEQ ID NO: 4689 | AGAGATTAAGGGGAAGGTAGG | SEQ ID NO: 7055 |
| rs11908 | GGGGCAGATGGGATGCTCAA | SEQ ID NO: 2324 | GGGGCAGATGGGATGCTCAG | SEQ ID NO: 4690 | GTGCAAAACAATAAGTCTCCTTA | SEQ ID NO: 7056 |
| rs1059288 | GGCTCCTCGAGGACAGGGACT | SEQ ID NO: 2325 | GGCTCCTCGAGGACAGGGACC | SEQ ID NO: 4691 | CTGTCTGTCCACTGCTGTAAC | SEQ ID NO: 7057 |
| rs3025657 | AAGCACTTGCTTATATGTTATTCTCTCCA | SEQ ID NO: 2326 | AAGCACTTGCTTATATGTTATTCTCTCCC | SEQ ID NO: 4692 | GAATTGAATTTACTCCTCAAAGTAA | SEQ ID NO: 7058 |
| rs213209 | TCATTCAGTGTCATAAGTCAGTGCAT | SEQ ID NO: 2327 | TCATTCAGTGTCATAAGTCAGTGCAC | SEQ ID NO: 4693 | TTTATTAAAAGCAGAGCTTCATG | SEQ ID NO: 7059 |
| rs7766900 | TCTTTGCTTTCACTATCCTATGGCCT | SEQ ID NO: 2328 | TCTTTGCTTTCACTATCCTATGGCCC | SEQ ID NO: 4694 | TTTATAGTTGGCTGATAAATATGTG | SEQ ID NO: 7060 |
| rs3130268 | TCACAGCTTTGCCTCTTTTTTTTTTTT | SEQ ID NO: 2329 | TCACAGCTTTGCCTCTTTTTTTTTTTG | SEQ ID NO: 4695 | TGTATTTATTCCAGACCTTTCTG | SEQ ID NO: 7061 |
| rs3749952 | CCCTAGCAGGGAGCTGAGCTA | SEQ ID NO: 2330 | CCCTAGCAGGGAGCTGAGCAC | SEQ ID NO: 4696 | ATCCCAACAAACTGGGGTT | SEQ ID NO: 7062 |
| rs6456951 | TCTTAACTGAAATCCAAGTTCCAATAAA | SEQ ID NO: 2331 | TCTTAACTGAAATCCAAGTTCCAATAAT | SEQ ID NO: 4697 | ATCAAGAGTATAACATTCCTCTTT | SEQ ID NO: 7063 |
| rs2523974 | AGGCAACAACCTTGATCTTGGACTT | SEQ ID NO: 2332 | AGGCAACAACCTTGATCTTGGACTG | SEQ ID NO: 4698 | GAAAATAAATTGCTGTTGCTAGA | SEQ ID NO: 7064 |
| rs6904236 | GGAACCGCACCAACTGGCA | SEQ ID NO: 2333 | GGAACCGCACCAACTGGCG | SEQ ID NO: 4699 | AGCTGCTGAAATTCCTGAATA | SEQ ID NO: 7065 |
| rs4713518 | TGATTTCTTAAGGTAAGTTTCACATTCCTA | SEQ ID NO: 2334 | TGATTTCTTAAGGTAAGTTTCACATTCCTG | SEQ ID NO: 4700 | TTTTATATTGCCACTATCTTAGAAG | SEQ ID NO: 7066 |
| rs2267646 | CAGAGGCCTTTTCCCCTCCCA | SEQ ID NO: 2335 | CAGAGGCCTTTTCCCCTCCCC | SEQ ID NO: 4701 | CTCCCAAATCTGCTTTTCTC | SEQ ID NO: 7067 |
| rs502626 | AAAATATTGATAATCTCAGCTCAAAATAAT | SEQ ID NO: 2336 | AAAATATTGAAAATCTCAGCTCAAAATAAC | SEQ ID NO: 4702 | CACAGAAGATATTGAAAATATGAAA | SEQ ID NO: 7068 |
| rs6468 | CCCCGGGCTTCTTGCACT | SEQ ID NO: 2337 | CCCCGGGCTTCTTGCACC | SEQ ID NO: 4703 | ATCTATCTGCTTGGCCTGACT | SEQ ID NO: 7069 |
| rs3129110 | TTGCTGTGCAGCATATTCTTATATACATA | SEQ ID NO: 2338 | TTGCTGTGCAGCATATTCTTATATACATG | SEQ ID NO: 4704 | TCAATTATCTTTTCTTATTTTAACTC | SEQ ID NO: 7070 |
| rs6456947 | CACAAAAGAAATAAATAAAAGGCATCCAA | SEQ ID NO: 2339 | CACAAAAGAAATAAATAAAAGGCATCCAG | SEQ ID NO: 4705 | CTAAAAAGGAAGAAGTAAAATTTTC | SEQ ID NO: 7071 |
| rs3129154 | CATGTTTTTCAAGAGTCAAGATTACAATAT | SEQ ID NO: 2340 | CATCTTTTTCTAGAGTCAAGATTACAATAC | SEQ ID NO: 4706 | TGAGTTATTAAAAGTTTTTCAAAACA | SEQ ID NO: 7072 |
| rs1009382 | AGAGGCTCCTCGGGGGGCT | SEQ ID NO: 2341 | AGAGGCTCCTCGGGGGGCC | SEQ ID NO: 4707 | CTCTGTGCCTGGTTCTGTAG | SEQ ID NO: 7073 |
| rs1043618 | CCCTGCTCTCTGTCGGCTCC | SEQ ID NO: 2342 | CCCTGCTCTCTGTCGGCTCG | SEQ ID NO: 4708 | CTCTGAGATTGGGGGCTG | SEQ ID NO: 7074 |
| rs7754402 | AGAAATTTGACAAAAGATTACAGGAACT | SEQ ID NO: 2343 | AGAAATTTGACAAAAGATTACAGGAACC | SEQ ID NO: 4709 | AAAAACATAAGTGACTTGATGGA | SEQ ID NO: 7075 |
| rs2269706 | GAGGCCCAAGGCAACAGTTCT | SEQ ID NO: 2344 | GAGGCCCAAGGCAACAGTTCC | SEQ ID NO: 4710 | AGAGGCCTGTGGAAGATG | SEQ ID NO: 7076 |
| rs4713505 | GCATGGTGCTATAAAATTGATGATGAA | SEQ ID NO: 2345 | GCATGGTGCTATATTTAAGATGATGATG | SEQ ID NO: 4711 | TTATTATTATTTATAGAGTCTTGCTCT | SEQ ID NO: 7077 |
| rs205000 | CCAAGAACACAGGCCTCCCCG | SEQ ID NO: 2346 | CCAAGAACACAGGCCTCCCCC | SEQ ID NO: 4712 | TTCTTCAGCTCTCTGAAGTTTC | SEQ ID NO: 7078 |
| rs2071278 | GGAAGGGACAACATGTAAGCTCAGA | SEQ ID NO: 2347 | GGAAGGGACAACATGTAAGCTCAGG | SEQ ID NO: 4713 | AGAATCTAACCTGAGGTGTT | SEQ ID NO: 7079 |
| rs477005 | TCCCAATTCCCTAGTTGTTTTTTCTA | SEQ ID NO: 2348 | TCCCAATTCCCTAGTTGTTTTTTCTG | SEQ ID NO: 4714 | GGTACCATAAAGACTTCTAGCAGA | SEQ ID NO: 7080 |
| rs535586 | CCGGGCAGAACCTAACTCCTCT | SEQ ID NO: 2349 | CCGGGCAGAACCTAACTCCTCC | SEQ ID NO: 4715 | ACTAGAAAAAGATCAGAAAAATTGA | SEQ ID NO: 7081 |
| rs1052248 | CATCTCGAGCCTCCGTTCAAAA | SEQ ID NO: 2350 | CATCTCGAGCCTCCGTTCAAAT | SEQ ID NO: 4716 | GATCATCATCAAAACTTATGTGG | SEQ ID NO: 7082 |
| rs621701 | GGGGACAAGGCAACATACCTCAA | SEQ ID NO: 2351 | GGGGACAAGGCAACATACCTCAG | SEQ ID NO: 4717 | TTCCTTATCCATAAAATAGGGG | SEQ ID NO: 7063 |
| rs2072679 | TCCCTCCCTCCACATATACATGCA | SEQ ID NO: 2352 | TCCCTCCCTCCACATATACATGCG | SEQ ID NO: 4718 | TTCTAAGAGAAGGAAATCTTTCTC | SEQ ID NO: 7084 |
| rs805257 | CCGTGAGAAAAGGAGGAGCCCA | SEQ ID NO: 2353 | CCGTGAGAAAAGGAGGAGCCCG | SEQ ID NO: 4719 | TTCTTGCTTGAGAATGATAAACT | SEQ ID NO: 7085 |
| rs469064 | TCACAAGGACCAGAGCTGTTTAGCA | SEQ ID NO: 2354 | TCACAAGGACCAGAGCTGTTTAGCC | SEQ ID NO: 4720 | CAAGGTGTTGATTAAACTTCAG | SEQ ID NO: 7086 |
| rs1264517 | TCATTGTCACAACCTAGCTGGAACT | SEQ ID NO: 2355 | TCATTGTCACAACCTAGCTGGAACA | SEQ ID NO: 4721 | TACATGAAGTGTCTACAATTGGG | SEQ ID NO: 7087 |
| rs211457 | GACAGCATGAACAGAAGTGAGGACA | SEQ ID NO: 2358 | GACAGCATGAACAGAAGTGAGGACG | SEQ ID NO: 4722 | AACCTAAAAGTGGGAATAACCTC | SEQ ID NO: 7088 |
| rs537160 | CCCAACGATCCTGCTGTTCAACT | SEQ ID NO: 2357 | CCCAACGATCCTGCTGTTCAACC | SEQ ID NO: 4723 | TTGACTACAAAGTGGTCCTCC | SEQ ID NO: 7089 |
| rs2075600 | TGTGATGATAGGGTTACACATCTGCTT | SEQ ID NO: 2358 | TGTGATGATAGGGTTACACATCTGCTC | SEQ ID NO: 4724 | AATTCCTTTCTCTTATGATCTAAC | SEQ ID NO: 7090 |
| rs707926 | CAATGTCATCGATCCCCTGGAT | SEQ ID NO: 2359 | CAATGTCATCGATCCCCTGGAC | SEQ ID NO: 4725 | TCATCTATGGAATCTCCCTG | SEQ ID NO: 7091 |
| rs387608 | TGTATTTTTTTTAACAAGCAGCCCAT | SEQ ID NO: 2360 | TGTATTTTTTTTAACAAGCAGCCCAC | SEQ ID NO: 4726 | TAATTTTGACACAGGCATAATAAC | SEQ ID NO: 7092 |
| rs2071888 | ATGGGACCTTCTGGCTGCCTAC | SEQ ID NO: 2361 | ATGGGACCTTCTGGCTGCCTAG | SEQ ID NO: 4727 | GTTCAACCCTTTCAGGAGG | SEQ ID NO: 7093 |
| rs2073524 | GCGCTGAGTCTGAGGGGAAA | SEQ ID NO: 2362 | GCGCTGAGTCTGAGGGGAAT | SEQ ID NO: 4728 | CTGTGGTACCTTCCTGTCC | SEQ ID NO: 7094 |
| rs805306 | TGGTGGGGCTCTACTCACCAGT | SEQ ID NO: 2363 | TGGTGGGGCTCTACTCACCAGC | SEQ ID NO: 4729 | CTTTGACCTCTCCCATTCTTC | SEQ ID NO: 7095 |
| rs4S6416 | GCCCTGGGAGCAGGGAAACA | SEQ ID NO: 2364 | GCCCTGGGAGCAGGGAAACG | SEQ ID NO: 4730 | CATGGTCAGGTTACTGGGG | SEQ ID NO: 7096 |
| rs652888 | CTGGGGCGAGGAGGCAGA | SEQ ID NO: 2365 | CTGGGGCGAGGAGGCAGG | SEQ ID NO: 4731 | GTCAGCTCAACCCCATGAT | SEQ ID NO: 7097 |
| rs2075798 | TAGGCCTCGTCATCCTCGTCCA | SEQ ID NO: 2366 | TAGGCCTCGTCATCCTCGTCCC | SEQ ID NO: 4732 | CTCAGTCTCCGGAGTGATTG | SEQ ID NO: 7098 |

1. A method comprising:
(a) providing the identity of the nucleotide for each of a set of single nucleotide polymorphisms (SNPs) in the major histocompatability complex (MHC) region in a population of individuals;
(b) providing the HLA type for said individuals; and
(c) identifying a SNP haplotype in said population that correlates with said HLA type, wherein said SNP haplotype comprises said SNPs in said MHC region.

2. The method of claim 1, wherein said HLA type is an HLA serotype.

3. The method of claim 1, wherein linkage disequilibrium is used to correlate said SNP haplotype in said population to said HLA type.

4. The method of claim 1, wherein said set of SNPs comprises at least one SNP selected from the group consisting of the SNPs shown on Table 1.

5. The method of claim 1, wherein said SNP haplotype comprise at least one SNP that occurs outside of the translated region(s) of an HLA gene.

6. The method of claim 1, wherein said MHC region consists essentially of human chromosome 6 between the Ret Finger Protein (RFP) gene and the MLN gene.

7. The method of claim 1, wherein said method further comprises identifying said SNP haplotype as predictive of transplantation compatibility.

8. The method of claim 1, wherein said method further comprises identifying said SNP haplotype as predictive of transfusion compatibility.

9. The method of claim 1, wherein said method further comprises identifying said SNP haplotype as predictive of an immunological or inflammatory condition.

10. The method of claim 9, wherein said immunological or inflammatory condition is selected from the group consisting of inflammatory bowel disease (IBD), ulcerative colitis, Crohn's disease, rheumatoid arthritis, diabetes, type I diabetes mellitus (IDDM), myasthenia gravis, vitiligo, Graves' disease, Hashimoto's disease, Addison's disease, autoimmune gastritis and autoimmune hepatitis, rheumatoid disease, systemic lupus erythematosus (SLE), progressive systemic sclerosis and variants, polymyositis, dermatomyositis, pernicious anemia including some of autoimmune gastritis, primary biliary cirrhosis, autoimmune thrombocytopenia, Sjogren's syndrome, multiple sclerosis (MS), Reiter's syndrome, and psoriasis.

11. The method of claim 1, wherein said haplotype comprises at least 4 SNPs.

12. The method of claim 1, wherein said population of individuals comprises individuals having said HLA type and individuals having a different HLA type.

13. A method for predicting the HLA type of an individual, said method comprising:
(a) providing the identity of the nucleotide for each of a set of SNPs in one or more nucleic acids from said individual that correlate with an HLA type; and
(b) predicting the HLA type of said individual based on a SNP haplotype comprising said set of SNPs.

14. The method of claim 13, wherein said SNPs that correlate with HLA type are identified by a method comprising:
(a) providing the identity of the nucleotide for each of a set of single nucleotide polymorphisms (SNPs) in the major histocompatability complex (MHC) region in a population of individuals;
(b) providing said HLA type for said individuals; and
(c) identifying a SNP haplotype in said population that correlates with said HLA type, wherein said SNP haplotype comprises said SNPs in said MHC region.

15. The method of claim 13, wherein said HLA type is an HLA serotype.

16. The method of claim 13, wherein said set of SNPs comprises at least one SNP selected from the group consisting of the SNPs shown on Table 1.

17. The method of claim 13, wherein said SNP haplotype comprises at least one SNP that occurs outside of the translated region(s) of an HLA gene.

18. The method of claim 13, wherein said haplotype comprises at least 4 SNPs.

19. A method of identifying an SNP haplotype that correlates with an allelic variant of an MHC gene, said method comprising:
(a) providing the identity of the nucleotide for each of a set of single nucleotide polymorphisms (SNPs) in the major histocompatability complex (MHC) region in a population of individuals;
(b) providing the presence or absence of said allelic variant of an MHC gene in said individuals; and
(c) identifying a SNP haplotype in said population that correlates with said allelic variant of an MHC gene, wherein said SNP haplotype comprises said set of SNPs.

20. The method of claim 19, wherein linkage disequilibrium is used to correlate said SNP haplotype in said population to said allelic variant of an MHC gene.

21. The method of claim 19, wherein said set of SNPs comprises at least one SNP selected from the group consisting of the SNPs shown on Table 1.

22. The method of claim 19, wherein said SNP haplotype comprises at least two SNPs that occur outside of the coding region of an HLA gene.

23. The method of claim 19, wherein said MHC region consists essentially of human chromosome 6 between the Ret Finger Protein (RFP) gene and the MLN gene.

24. The method of claim 19, wherein said SNP haplotype comprises at least 4 SNPs.

25. The method of claim 19, wherein said allelic variant of said MHC gene comprises a genetic marker in a translated region of said MHC gene.

26. The method of claim 19, wherein said set of SNPs comprises a SNP that is outside of the translated region(s) of an MHC gene.

27. A method for determining the presence or absence of an allelic variant of an MHC gene in an individual, said method comprising:
(a) providing the identity of the nucleotide for each of a set of SNPs in one or more nucleic acids from said individual that correlate with said allelic variant of an MHC gene; and
(b) determining presence or absence of an allelic variant of an MHC gene in said individual based on a SNP haplotype comprising said set of SNPs.

28. The method of claim 27, wherein said SNPs that correlate with said allelic variant of an MHC gene are identified by a method comprising:
(a) providing the identity of the nucleotide for each of a set of single nucleotide polymorphisms (SNPs) in the major histocompatability complex (MHC) region in a population of individuals;
(b) providing the presence or absence of said allelic variant of an MHC gene in said individuals; and
(c) identifying a SNP haplotype in said population that correlates with said MHC genotype, wherein said SNP haplotype comprises wherein said SNP haplotype comprises said set of SNPs.

29. The method of claim 27, wherein said set of SNPs comprises at least one SNP selected from the group consisting of the SNPs shown on Table 1.

30. The method of claim 27, wherein said SNP haplotype comprises at least 4 SNPs.

31. The method of claim 27, wherein said allelic variant of said MHC gene comprises a genetic marker in a translated region of said MHC gene.

32. The method of claim 27 or 28, wherein said set of SNPs comprises a SNP that is outside of the translated region(s) of said MHC gene

33. A method for identifying a SNP haplotype that correlates with susceptibility to a disease or condition, said method comprising:
(a) providing the identity of the nucleotide for each of a set of single nucleotide polymorphism (SNPs) in the major histocompatability complex (MHC) region in a population of individuals;
(b) providing susceptibility to said disease or condition for said individuals; and
(c) identifying a SNP haplotype in said population that correlates with said susceptibility to said disease, wherein said SNP haplotype comprises said SNPs in the MHC region.

34. The method of claim 33, wherein linkage disequilibrium is used to correlate said SNP haplotype in said population to said susceptibility to said disease.

35. The method of claim 33, wherein said set of SNPs comprises at least one SNP selected from the group consisting of the SNPs shown on Table 1.

36. The method of claim 33, wherein said SNP haplotype comprise at least one SNP that occurs outside of the translated region(s) of an HLA gene.

37. The method of claim 33, wherein said MHC region consists essentially of human chromosome 6 between the Ret Finger Protein (RFP) gene and the MLN gene.

38. The method of claim 33, wherein said disease or condition comprises an immunological or inflammatory condition.

39. The method of claim 38, wherein said immunological or inflammatory condition is selected from the group consisting of inflammatory bowel disease (IBD), ulcerative colitis, Crohn's disease, rheumatoid arthritis, diabetes, type I diabetes mellitus (IDDM), myasthenia gravis, vitiligo, Graves' disease, Hashimoto's disease, Addison's disease, autoimmune gastritis and autoimmune hepatitis, rheumatoid disease, systemic lupus erythematosus (SLE), progressive systemic sclerosis and variants, polymyositis, dermatomyositis, pernicious anemia including some of autoimmune gastritis, primary biliary cirrhosis, autoimmune thrombocytopenia, Sjogren's syndrome, multiple sclerosis (MS), Reiter's syndrome, and psoriasis.

40. The method of claim 33, wherein said haplotype comprises at least 4 SNPs.

41. The method of claim 33, wherein said population of individuals comprises individuals having said disease or condition and individuals that do not have said disease or condition.

42. A method for determining the susceptibility of an individual to a disease or condition, said method comprising:
(a) providing the identity of a set of SNPs in one or more nucleic acids from said individual that correlate with susceptibility to said disease or condition; and
(b) determining said susceptibility of said individual to said disease or condition based on a SNP haplotype comprising said set of SNPs.

43. The method of claim 42, wherein said SNPs that correlate with susceptibility to said disease or condition are identified by a method comprising the steps of:
(a) providing the identity of the nucleotide for each of a set of single nucleotide polymorphism (SNPs) in the major histocompatability complex (MHC) region in a population of individuals;
(b) providing susceptibility to said disease or condition for said individuals; and
(c) identifying a SNP haplotype in said population that correlates with said susceptibility to said disease or condition, wherein said SNP haplotype comprises said SNPs in the MHC region.

44. The method of claim 42, wherein said set of SNPs comprises at least one SNP selected from the group consisting of the SNPs shown on Table 1.

45. The method of claim 42, wherein said SNP haplotype comprise at least one SNP that occurs outside of the translated region(s) of an HLA gene.

46. The method of claim 42, wherein said disease or condition comprises an immunological or inflammatory condition.

47. The method of claim 46, wherein said immunological or inflammatory condition is selected from the group consisting of inflammatory bowel disease (IBD), ulcerative colitis, Crohn's disease, rheumatoid arthritis, diabetes, type I diabetes mellitus (IDDM), myasthenia gravis, vitiligo, Graves' disease, Hashimoto's disease, Addison's disease, autoimmune gastritis and autoimmune hepatitis, rheumatoid disease, systemic lupus erythematosus (SLE), progressive systemic sclerosis and variants, polymyositis, dermatomyositis, pernicious anemia including some of autoimmune gastritis, primary biliary cirrhosis, autoimmune thrombocytopenia, Sjogren's syndrome, multiple sclerosis (MS), Reiter's syndrome, and psoriasis.

48. The method of claim 40, wherein said haplotype comprises at least 4 SNPs.

The application's sequence listing, which the Patent Office published only in electronic form, follows.

SEQUENCE LISTING (7098 sequences)

SEQ ID NO: 1 - DNA, 24 bp, Artificial Sequence
  Description of Artificial Sequence: Synthetic oligonucleotide
ttttcagcaaacacctttttccct

SEQ ID NO: 2 - DNA, 25 bp, Artificial Sequence
  Description of Artificial Sequence: Synthetic oligonucleotide
tgcaaaattgccttcatagaggcta

SEQ ID NO: 3 - DNA, 22 bp, Artificial Sequence
  Description of Artificial Sequence: Synthetic oligonucleotide
gaggccagagcaaatttcccca

SEQ ID NO: 4 - DNA, 24 bp, Artificial Sequence
  Description of Artificial Sequence: Synthetic oligonucleotide
cttggatttcccacaatatggcta

SEQ ID NO: 5 - DNA, 24 bp, Artificial Sequence
  Description of Artificial Sequence: Synthetic oligonucleotide
tgggataacagctgaactgggata

SEQ ID NO: 6 - DNA, 25 bp, Artificial Sequence
  Description of Artificial Sequence: Synthetic oligonucleotide
agcagacactggtaggaacaaggaa

SEQ ID NO: 7 - DNA, 23 bp, Artificial Sequence
  Description of Artificial Sequence: Synthetic oligonucleotide
tctgggggcagcatttctagttt

SEQ ID NO: 8 - DNA, 23 bp, Artificial Sequence
  Description of Artificial Sequence: Synthetic oligonucleotide
tatgccaggcacgatgctgaata

SEQ ID NO: 9 - DNA, 23 bp, Artificial Sequence
  Description of Artificial Sequence: Synthetic oligonucleotide
gggaaggactgagagtcccatta

SEQ ID NO: 10 - DNA, 22 bp, Artificial Sequence
  Description of Artificial Sequence: Synthetic oligonucleotide
aatcttggcatccctccctcca

SEQ ID NO: 11 - DNA, 25 bp, Artificial Sequence
  Description of Artificial Sequence: Synthetic oligonucleotide
tgaggttcactgagatttgttggca

SEQ ID NO: 12 - DNA, 26 bp, Artificial Sequence
  Description of Artificial Sequence: Synthetic oligonucleotide
aaggaaagaacagagcagcagaatca

SEQ ID NO: 13 - DNA, 20 bp, Artificial Sequence
  Description of Artificial Sequence: Synthetic oligonucleotide
ccctgcgagttgaggcatga

SEQ ID NO: 14 - DNA, 24 bp, Artificial Sequence
  Description of Artificial Sequence: Synthetic oligonucleotide
ttcccctttatcccctgctaatca

SEQ ID NO: 15 - DNA, 24 bp, Artificial Sequence
  Description of Artificial Sequence: Synthetic oligonucleotide
tggatttggcaacatggagctaaa

SEQ ID NO: 16 - DNA, 23 bp, Artificial Sequence
  Description of Artificial Sequence: Synthetic oligonucleotide
acaggaagcaaagggaagctcca

SEQ ID NO: 17 - DNA, 24 bp, Artificial Sequence
  Description of Artificial Sequence: Synthetic oligonucleotide
caaagttgtcctgggttgactcaa

SEQ ID NO: 18 - DNA, 26 bp, Artificial Sequence
  Description of Artificial Sequence: Synthetic oligonucleotide
gataatcaggaagggcaaggttatgt

SEQ ID NO: 19 - DNA, 25 bp, Artificial Sequence
  Description of Artificial Sequence: Synthetic oligonucleotide
ttccagtcctttctgtggaaagaaa

SEQ ID NO: 20 - DNA, 27 bp, Artificial Sequence
  Description of Artificial Sequence: Synthetic oligonucleotide
cctccctgttggttactcttcatctct

SEQ ID NO: 21 - DNA, 25 bp, Artificial Sequence
  Description of Artificial Sequence: Synthetic oligonucleotide
ggtgagggaatgccagtttatgttt

SEQ ID NO: 22 - DNA, 25 bp, Artificial Sequence
  Description of Artificial Sequence: Synthetic oligonucleotide
caaggacattttgtgctggattaat

SEQ ID NO: 23 - DNA, 22 bp, Artificial Sequence
  Description of Artificial Sequence: Synthetic oligonucleotide
gaacaaagggttaaagggcgcg

SEQ ID NO: 24 - DNA, 26 bp, Artificial Sequence
  Description of Artificial Sequence: Synthetic oligonucleotide
tctctgcatatcaccatcattgtcct

SEQ ID NO: 25 - DNA, 24 bp, Artificial Sequence
  Description of Artificial Sequence: Synthetic oligonucleotide
tgcctgcttccttttcaaattcaa

SEQ ID NO: 26 - DNA, 23 bp, Artificial Sequence
  Description of Artificial Sequence: Synthetic oligonucleotide
gggtggtaacccagccactcttt

SEQ ID NO: 27 - DNA, 22 bp, Artificial Sequence
  Description of Artificial Sequence: Synthetic oligonucleotide
ggggtgggacacagagtggaaa

SEQ ID NO: 28 - DNA, 23 bp, Artificial Sequence
  Description of Artificial Sequence: Synthetic oligonucleotide
atagcaggcagcctgggttttca

SEQ ID NO: 29 - DNA, 25 bp, Artificial Sequence
  Description of Artificial Sequence: Synthetic oligonucleotide
ccttgagtcatggaggaatccagtt

SEQ ID NO: 30 - DNA, 26 bp, Artificial Sequence
  Description of Artificial Sequence: Synthetic oligonucleotide
ggttcatgcaaaaaagcaacattagt

SEQ ID NO: 31 - DNA, 27 bp, Artificial Sequence
  Description of Artificial Sequence: Synthetic oligonucleotide
gggcaagtaaggagactgatacgaaga

SEQ ID NO: 32 - DNA, 21 bp, Artificial Sequence
  Description of Artificial Sequence: Synthetic oligonucleotide
ccgaggctctggcactcactt

SEQ ID NO: 33 - DNA, 27 bp, Artificial Sequence
  Description of Artificial Sequence: Synthetic oligonucleotide
cctttggtgaaaataaacacacatggg

SEQ ID NO: 34 - DNA, 24 bp, Artificial Sequence
  Description of Artificial Sequence: Synthetic oligonucleotide
caaggaaaggagtcaggggctaat

SEQ ID NO: 35 - DNA, 21 bp, Artificial Sequence
  Description of Artificial Sequence: Synthetic oligonucleotide
gtgtgaaggaacctggcccat

SEQ ID NO: 36 - DNA, 27 bp, Artificial Sequence
  Description of Artificial Sequence: Synthetic oligonucleotide
tgatcttattccagaccagcgatacta

SEQ ID NO: 37 - DNA, 24 bp, Artificial Sequence
  Description of Artificial Sequence: Synthetic oligonucleotide
caaccccaatcccacaggtttaat

SEQ ID NO: 38 - DNA, 24 bp, Artificial Sequence
  Description of Artificial Sequence: Synthetic oligonucleotide
tctgcagagccatcttccaagaca

SEQ ID NO: 39 - DNA, 24 bp, Artificial Sequence
  Description of Artificial Sequence: Synthetic oligonucleotide
tcttgatctctgccatctggagga

SEQ ID NO: 40 - DNA, 24 bp, Artificial Sequence
  Description of Artificial Sequence: Synthetic oligonucleotide
aacaactttggcatctctccagat

SEQ ID NO: 41 - DNA, 25 bp, Artificial Sequence
  Description of Artificial Sequence: Synthetic oligonucleotide
ttgtgcataagctacaagagctgat

SEQ ID NO: 42 - DNA, 27 bp, Artificial Sequence
  Description of Artificial Sequence: Synthetic oligonucleotide
tggttgaaagatgttttgagagctctt

SEQ ID NO: 43 - DNA, 21 bp, Artificial Sequence
  Description of Artificial Sequence: Synthetic oligonucleotide
cagacagtgagctcgccctgt

SEQ ID NO: 44 - DNA, 22 bp, Artificial Sequence
  Description of Artificial Sequence: Synthetic oligonucleotide
agagtcccaggcgcctttaccg

SEQ ID NO: 45 - DNA, 24 bp, Artificial Sequence
  Description of Artificial Sequence: Synthetic oligonucleotide
ttgcagaaaggttgtggaaaagaa

SEQ ID NO: 46 - DNA, 20 bp, Artificial Sequence
  Description of Artificial Sequence: Synthetic oligonucleotide
cgtccagtgtcacaggggct

SEQ ID NO: 47 - DNA, 27 bp, Artificial Sequence
  Description of Artificial Sequence: Synthetic oligonucleotide
tcaaaagagttgcctatactccctgat

SEQ ID NO: 48 - DNA, 19 bp, Artificial Sequence
  Description of Artificial Sequence: Synthetic oligonucleotide
cactcccattgggcgtcgg

SEQ ID NO: 49 - DNA, 23 bp, Artificial Sequence
  Description of Artificial Sequence: Synthetic oligonucleotide
gcttcccttcccattcaacacaa

SEQ ID NO: 50 - DNA, 21 bp, Artificial Sequence
  Description of Artificial Sequence: Synthetic oligonucleotide
aggctccctgtgatggagtca

SEQ ID NO: 51 - DNA, 24 bp, Artificial Sequence
  Description of Artificial Sequence: Synthetic oligonucleotide
tcattgagctcataccacatgcca

SEQ ID NO: 52 - DNA, 24 bp, Artificial Sequence
  Description of Artificial Sequence: Synthetic oligonucleotide
ccagcatctcatacaccaccatgt

SEQ ID NO: 53 - DNA, 19 bp, Artificial Sequence
  Description of Artificial Sequence: Synthetic oligonucleotide
ggagccgaaaagggcggta

SEQ ID NO: 54 - DNA, 26 bp, Artificial Sequence
  Description of Artificial Sequence: Synthetic oligonucleotide
tgcacaccacctagattctgtcaaaa

SEQ ID NO: 55 - DNA, 23 bp, Artificial Sequence
  Description of Artificial Sequence: Synthetic oligonucleotide
ggcctctactcactctcccccaa

SEQ ID NO: 56 - DNA, 24 bp, Artificial Sequence
  Description of Artificial Sequence: Synthetic oligonucleotide
ggattttccaactcgaaggatgaa

SEQ ID NO: 57 - DNA, 24 bp, Artificial Sequence
  Description of Artificial Sequence: Synthetic oligonucleotide
gcaccttgccacctgaaacttact

SEQ ID NO: 58 - DNA, 23 bp, Artificial Sequence
  Description of Artificial Sequence: Synthetic oligonucleotide
ccactggtggggtgaacttgtct

SEQ ID NO: 59 - DNA, 19 bp, Artificial Sequence
  Description of Artificial Sequence: Synthetic oligonucleotide
atgggctcaggagccccaa

SEQ ID NO: 60 - DNA, 29 bp, Artificial Sequence
  Description of Artificial Sequence: Synthetic oligonucleotide
gccagaaatacaccacctacagtacaaat

SEQ ID NO: 61 - DNA, 23 bp, Artificial Sequence
  Description of Artificial Sequence: Synthetic oligonucleotide
gggagggtgggaggaagatctta

SEQ ID NO: 62 - DNA, 26 bp, Artificial Sequence
  Description of Artificial Sequence: Synthetic oligonucleotide
agcaataaaaagtaggaagccaaaat

SEQ ID NO: 63 - DNA, 22 bp, Artificial Sequence
  Description of Artificial Sequence: Synthetic oligonucleotide
ctgcagaagcttgcccagctct

SEQ ID NO: 64 - DNA, 25 bp, Artificial Sequence
  Description of Artificial Sequence: Synthetic oligonucleotide
tttcacggtgtctcatttttcctct

SEQ ID NO: 65 - DNA, 21 bp, Artificial Sequence
  Description of Artificial Sequence: Synthetic oligonucleotide
gtgacagtttggccgttgcgt

SEQ ID NO: 66 - DNA, 20 bp, Artificial Sequence
  Description of Artificial Sequence: Synthetic oligonucleotide
agttgagcaatccggggggg

SEQ ID NO: 67 - DNA, 28 bp, Artificial Sequence
  Description of Artificial Sequence: Synthetic oligonucleotide
ggatttagactttctgaggtactcccat

SEQ ID NO: 68 - DNA, 26 bp, Artificial Sequence
  Description of Artificial Sequence: Synthetic oligonucleotide
tttgacttgttttggtttggtttcca

SEQ ID NO: 69 - DNA, 27 bp, Artificial Sequence
  Description of Artificial Sequence: Synthetic oligonucleotide
ctctgcgtggtaggtaaattttatgtt

SEQ ID NO: 70 - DNA, 23 bp, Artificial Sequence
  Description of Artificial Sequence: Synthetic oligonucleotide
tcagttgcaaagtcatacccggt

SEQ ID NO: 71 - DNA, 23 bp, Artificial Sequence
  Description of Artificial Sequence: Synthetic oligonucleotide
gagtggcattgcagccttcctat

SEQ ID NO: 72 - DNA, 28 bp, Artificial Sequence
  Description of Artificial Sequence: Synthetic oligonucleotide
tttcacttacttttgagtcttccttcct

SEQ ID NO: 73 - DNA, 23 bp, Artificial Sequence
  Description of Artificial Sequence: Synthetic oligonucleotide
agtgtctcaattcctttgcccaa

SEQ ID NO: 74 - DNA, 25 bp, Artificial Sequence
  Description of Artificial Sequence: Synthetic oligonucleotide
agagatttcccagaactccgataac

SEQ ID NO: 75 - DNA, 20 bp, Artificial Sequence
  Description of Artificial Sequence: Synthetic oligonucleotide
gctgcattgcttttgcgcaa

SEQ ID NO: 76 - DNA, 23 bp, Artificial Sequence
  Description of Artificial Sequence: Synthetic oligonucleotide
ccattttcttcttgggcgctctt

SEQ ID NO: 77 - DNA, 22 bp, Artificial Sequence
  Description of Artificial Sequence: Synthetic oligonucleotide
ttgacagatttgccggcttcct

SEQ ID NO: 78 - DNA, 23 bp, Artificial Sequence
  Description of Artificial Sequence: Synthetic oligonucleotide
tctaaccccatctgctcccctct

SEQ ID NO: 79 - DNA, 21 bp, Artificial Sequence
  Description of Artificial Sequence: Synthetic oligonucleotide
ctgcccctacccagcagtgat

SEQ ID NO: 80 - DNA, 21 bp, Artificial Sequence
  Description of Artificial Sequence: Synthetic oligonucleotide
gccagagaaaaggggtgggat

SEQ ID NO: 81 - DNA, 22 bp, Artificial Sequence
  Description of Artificial Sequence: Synthetic oligonucleotide
agtggggtcttggggcagtagt

SEQ ID NO: 82 - DNA, 20 bp, Artificial Sequence
  Description of Artificial Sequence: Synthetic oligonucleotide
gaggtccattgacgcctgga

SEQ ID NO: 83 - DNA, 18 bp, Artificial Sequence
  Description of Artificial Sequence: Synthetic oligonucleotide
atgctcctgcccctgcca

SEQ ID NO: 84 - DNA, 22 bp, Artificial Sequence
  Description of Artificial Sequence: Synthetic oligonucleotide
gacacagagatgccgtggaaaa

SEQ ID NO: 85 - DNA, 22 bp, Artificial Sequence
  Description of Artificial Sequence: Synthetic oligonucleotide
ctccagctgtggcagtacagct

SEQ ID NO: 86 - DNA, 28 bp, Artificial Sequence
  Description of Artificial Sequence: Synthetic oligonucleotide
tgaagtaagtcaaatttggtttagagga

SEQ ID NO: 87 - DNA, 20 bp, Artificial Sequence
  Description of Artificial Sequence: Synthetic oligonucleotide
gggtcctggctgtgaggcta

SEQ ID NO: 88 - DNA, 21 bp, Artificial Sequence
  Description of Artificial Sequence: Synthetic oligonucleotide
cgctcgatgcagtcacaatgt

SEQ ID NO: 89 - DNA, 28 bp, Artificial Sequence
  Description of Artificial Sequence: Synthetic oligonucleotide
aaccgtttacttagaagacccagataaa

SEQ ID NO: 90 - DNA, 24 bp, Artificial Sequence
  Description of Artificial Sequence: Synthetic oligonucleotide
ttagagcaatttccaacccttgct

SEQ ID NO: 91 - DNA, 19 bp, Artificial Sequence
  Description of Artificial Sequence: Synthetic oligonucleotide
agctgctccggttccccaa

SEQ ID NO: 92 - DNA, 21 bp, Artificial Sequence
  Description of Artificial Sequence: Synthetic oligonucleotide
cccagcagccgaatgatgttt

SEQ ID NO: 93 - DNA, 28 bp, Artificial Sequence
  Description of Artificial Sequence: Synthetic oligonucleotide
agttggaataagcccactatagtctgta

SEQ ID NO: 94 - DNA, 22 bp, Artificial Sequence
  Description of Artificial Sequence: Synthetic oligonucleotide
gagggcgatattctggtggtgt

SEQ ID NO: 95 - DNA, 22 bp, Artificial Sequence
  Description of Artificial Sequence: Synthetic oligonucleotide
aggtgctgaggaaagctcccat

SEQ ID NO: 96 - DNA, 19 bp, Artificial Sequence
  Description of Artificial Sequence: Synthetic oligonucleotide
ggtcaggtgctgaggcgca

SEQ ID NO: 97 - DNA, 24 bp, Artificial Sequence
  Description of Artificial Sequence: Synthetic oligonucleotide
tggagtcttgcctttgctctcctt

SEQ ID NO: 98 - DNA, 21 bp, Artificial Sequence
  Description of Artificial Sequence: Synthetic oligonucleotide
cagagggaggggagctaccat

SEQ ID NO: 99 - DNA, 19 bp, Artificial Sequence
  Description of Artificial Sequence: Synthetic oligonucleotide
accggtggcgggttctcaa

SEQ ID NO: 100 - DNA, 19 bp, Artificial Sequence
  Description of Artificial Sequence: Synthetic oligonucleotide
ggcactgagcacgcagggt

SEQ ID NO: 101 - DNA, 20 bp, Artificial Sequence
  Description of Artificial Sequence: Synthetic oligonucleotide
gaacaaagtgggcgtccgct

SEQ ID NO: 102 - DNA, 28 bp, Artificial Sequence
  Description of Artificial Sequence: Synthetic oligonucleotide
tcgcttatatactggagaggctaggaga

SEQ ID NO: 103 - DNA, 26 bp, Artificial Sequence
  Description of Artificial Sequence: Synthetic oligonucleotide
caacacctctgcaatcaagaactgat

SEQ ID NO: 104 - DNA, 30 bp, Artificial Sequence
  Description of Artificial Sequence: Synthetic oligonucleotide
tggatttcatctctcaataattctgcttat

SEQ ID NO: 105 - DNA, 30 bp, Artificial Sequence
  Description of Artificial Sequence: Synthetic oligonucleotide
gacatctttctactcagttaccattaggaa

SEQ ID NO: 106 - DNA, 21 bp, Artificial Sequence
  Description of Artificial Sequence: Synthetic oligonucleotide
cagaggcactggaaggagcct

SEQ ID NO: 107 - DNA, 22 bp, Artificial Sequence
  Description of Artificial Sequence: Synthetic oligonucleotide
atgtggaggtggaatgcccaca

SEQ ID NO: 108 - DNA, 20 bp, Artificial Sequence
  Description of Artificial Sequence: Synthetic oligonucleotide
ggccagatcccttccccaca

SEQ ID NO: 109 - DNA, 29 bp, Artificial Sequence
  Description of Artificial Sequence: Synthetic oligonucleotide
gcacctcgtatttttatcaagagacatta

SEQ ID NO: 110 - DNA, 29 bp, Artificial Sequence
  Description of Artificial Sequence: Synthetic oligonucleotide
tgcaaattgaagagatgtttaacagttat

SEQ ID NO: 111 - DNA, 26 bp, Artificial Sequence
  Description of Artificial Sequence: Synthetic oligonucleotide
caggatccaaacagtgatcagttcct

SEQ ID NO: 112 - DNA, 21 bp, Artificial Sequence
  Description of Artificial Sequence: Synthetic oligonucleotide
tgcagcatggaccactgctca

SEQ ID NO: 113 - DNA, 25 bp, Artificial Sequence
  Description of Artificial Sequence: Synthetic oligonucleotide
tcctgtgttaatagagggctccaca

SEQ ID NO: 114 - DNA, 21 bp, Artificial Sequence
  Description of Artificial Sequence: Synthetic oligonucleotide
gtcgctgctgtgctgtggaga

SEQ ID NO: 115 - DNA, 27 bp, Artificial Sequence
  Description of Artificial Sequence: Synthetic oligonucleotide
ggagattcgtagaaactggcaaacttt

SEQ ID NO: 116 - DNA, 20 bp, Artificial Sequence
  Description of Artificial Sequence: Synthetic oligonucleotide
ccctctgccctccctgttga

SEQ ID NO: 117 - DNA, 23 bp, Artificial Sequence
  Description of Artificial Sequence: Synthetic oligonucleotide
caacctttctggccagaggaacc

SEQ ID NO: 118 - DNA, 25 bp, Artificial Sequence
  Description of Artificial Sequence: Synthetic oligonucleotide
tctgtccttcattttcacaggagct

SEQ ID NO: 119 - DNA, 28 bp, Artificial Sequence
  Description of Artificial Sequence: Synthetic oligonucleotide
cattctattaacagccaaacaggaagat

SEQ ID NO: 120 - DNA, 24 bp, Artificial Sequence
  Description of Artificial Sequence: Synthetic oligonucleotide
tctcagaggaaatgggtccacaga

SEQ ID NO: 121 - DNA, 20 bp, Artificial Sequence
  Description of Artificial Sequence: Synthetic oligonucleotide
gcctcttccctttgcagggt

SEQ ID NO: 122 - DNA, 28 bp, Artificial Sequence
  Description of Artificial Sequence: Synthetic oligonucleotide
gatgagaggaaggaatatttgaaacaca

SEQ ID NO: 123 - DNA, 23 bp, Artificial Sequence
  Description of Artificial Sequence: Synthetic oligonucleotide
ctggtctggtctccacaagctca

SEQ ID NO: 124 - DNA, 22 bp, Artificial Sequence
  Description of Artificial Sequence: Synthetic oligonucleotide
gtgttccatcacctggggaact

SEQ ID NO: 125 - DNA, 24 bp, Artificial Sequence
  Description of Artificial Sequence: Synthetic oligonucleotide
gctcctcttggcagtgactaggga

SEQ ID NO: 126 - DNA, 25 bp, Artificial Sequence
  Description of Artificial Sequence: Synthetic oligonucleotide
gatagcaggagacctcgtcagagat

SEQ ID NO: 127 - DNA, 20 bp, Artificial Sequence
  Description of Artificial Sequence: Synthetic oligonucleotide
cactcccattgggtgtcgga

SEQ ID NO: 128 - DNA, 25 bp, Artificial Sequence
  Description of Artificial Sequence: Synthetic oligonucleotide
gactacagctgcaaggacaaccaga

SEQ ID NO: 129 - DNA, 20 bp, Artificial Sequence
  Description of Artificial Sequence: Synthetic oligonucleotide
gctctccagtcagtgccggt

SEQ ID NO: 130 - DNA, 23 bp, Artificial Sequence
  Description of Artificial Sequence: Synthetic oligonucleotide
agatgggagggcatatgagagcc

SEQ ID NO: 131 - DNA, 25 bp, Artificial Sequence
  Description of Artificial Sequence: Synthetic oligonucleotide
tgtttcacaattgccatgtggatta

SEQ ID NO: 132 - DNA, 19 bp, Artificial Sequence
  Description of Artificial Sequence: Synthetic oligonucleotide
ccactccgcccaccttccc

SEQ ID NO: 133 - DNA, 23 bp, Artificial Sequence
  Description of Artificial Sequence: Synthetic oligonucleotide
cttgtcatgcctcacagcagtga

SEQ ID NO: 134 - DNA, 18 bp, Artificial Sequence
  Description of Artificial Sequence: Synthetic oligonucleotide
cccgcagccagctggctt

SEQ ID NO: 135 - DNA, 19 bp, Artificial Sequence
  Description of Artificial Sequence: Synthetic oligonucleotide
ggtggggccaggttctcat

SEQ ID NO: 136 - DNA, 25 bp, Artificial Sequence
  Description of Artificial Sequence: Synthetic oligonucleotide
gtttggaggaatttttggttgtcat

SEQ ID NO: 137 - DNA, 23 bp, Artificial Sequence
  Description of Artificial Sequence: Synthetic oligonucleotide
cctttctggcctctcacaggaca

SEQ ID NO: 138 - DNA, 28 bp, Artificial Sequence
  Description of Artificial Sequence: Synthetic oligonucleotide
ccctttaactgcagctcacattattttt

SEQ ID NO: 139 - DNA, 24 bp, Artificial Sequence
  Description of Artificial Sequence: Synthetic oligonucleotide
gcttgcggtgataaccattcaaca

SEQ ID NO: 140 - DNA, 24 bp, Artificial Sequence
  Description of Artificial Sequence: Synthetic oligonucleotide
ttgaggcaaagtgggaagagaaaa

SEQ ID NO: 141 - DNA, 22 bp, Artificial Sequence
  Description of Artificial Sequence: Synthetic oligonucleotide
cagacctgcctttgggtagggt

SEQ ID NO: 142 - DNA, 24 bp, Artificial Sequence
  Description of Artificial Sequence: Synthetic oligonucleotide
ctcccatcagccctgttttaccta

SEQ ID NO: 143 - DNA, 23 bp, Artificial Sequence
  Description of Artificial Sequence: Synthetic oligonucleotide
aggggtaggaaggttgtagccct

SEQ ID NO: 144 - DNA, 23 bp, Artificial Sequence
  Description of Artificial Sequence: Synthetic oligonucleotide
caaattcttgggcatgaagtcgt

SEQ ID NO: 145 - DNA, 22 bp, Artificial Sequence
  Description of Artificial Sequence: Synthetic oligonucleotide
gatatgctgggctctggcttgt

SEQ ID NO: 146 - DNA, 22 bp, Artificial Sequence
  Description of Artificial Sequence: Synthetic oligonucleotide
tggactcccgtgactgagacca

SEQ ID NO: 147 - DNA, 23 bp, Artificial Sequence
  Description of Artificial Sequence: Synthetic oligonucleotide
ctactggtggtcagatgtgccat

SEQ ID NO: 148 - DNA, 23 bp, Artificial Sequence
  Description of Artificial Sequence: Synthetic oligonucleotide
ctactggtggtcagatgtgccat

SEQ ID NO: 149 - DNA, 23 bp, Artificial Sequence
  Description of Artificial Sequence: Synthetic oligonucleotide
taagctggcagtcctaaccccag

SEQ ID NO: 150 - DNA, 23 bp, Artificial Sequence
  Description of Artificial Sequence: Synthetic oligonucleotide
tggccacatggagcaagtttaat

SEQ ID NO: 151 - DNA, 23 bp, Artificial Sequence
  Description of Artificial Sequence: Synthetic oligonucleotide
ctcaagctgcaaacaggatccat

SEQ ID NO: 152 - DNA, 25 bp, Artificial Sequence
  Description of Artificial Sequence: Synthetic oligonucleotide
gcagagtttgtgcagacacacagat

SEQ ID NO: 153 - DNA, 23 bp, Artificial Sequence
  Description of Artificial Sequence: Synthetic oligonucleotide
atgagggtcagctcatttgccta

SEQ ID NO: 154 - DNA, 24 bp, Artificial Sequence
  Description of Artificial Sequence: Synthetic oligonucleotide
caaaagcacacagagacctcctgt

SEQ ID NO: 155 - DNA, 24 bp, Artificial Sequence
  Description of Artificial Sequence: Synthetic oligonucleotide
ttttgttaacaagatgggcacgat

SEQ ID NO: 156 - DNA, 24 bp, Artificial Sequence
  Description of Artificial Sequence: Synthetic oligonucleotide
ctgcatccagtggaactaaagcca

SEQ ID NO: 157 - DNA, 24 bp, Artificial Sequence
  Description of Artificial Sequence: Synthetic oligonucleotide
cgggatgatagcagctctcctaca

SEQ ID NO: 158 - DNA, 23 bp, Artificial Sequence
  Description of Artificial Sequence: Synthetic oligonucleotide
actgatgggtggggaatgttgaa

SEQ ID NO: 159 - DNA, 24 bp, Artificial Sequence
  Description of Artificial Sequence: Synthetic oligonucleotide
caggtgtctggagtgcaggtacat

SEQ ID NO: 160 - DNA, 24 bp, Artificial Sequence
  Description of Artificial Sequence: Synthetic oligonucleotide
tggagaggaaactactggcttggt

SEQ ID NO: 161 - DNA, 24 bp, Artificial Sequence
  Description of Artificial Sequence: Synthetic oligonucleotide
agttggccatctttgcatatgcta

SEQ ID NO: 162 - DNA, 25 bp, Artificial Sequence
  Description of Artificial Sequence: Synthetic oligonucleotide
aacacagacaactcaccaccaccta

SEQ ID NO: 163 - DNA, 22 bp, Artificial Sequence
  Description of Artificial Sequence: Synthetic oligonucleotide
gttgccaagcacatgttgcaaa

SEQ ID NO: 164 - DNA, 25 bp, Artificial Sequence
  Description of Artificial Sequence: Synthetic oligonucleotide
tgcctcctgatctatcgacagactt

SEQ ID NO: 165 - DNA, 22 bp, Artificial Sequence
  Description of Artificial Sequence: Synthetic oligonucleotide
aggcaggttgtgcagaggatct

SEQ ID NO: 166 - DNA, 25 bp, Artificial Sequence
  Description of Artificial Sequence: Synthetic oligonucleotide
gcagtagccgaaggttttccttctc

SEQ ID NO: 167 - DNA, 25 bp, Artificial Sequence
  Description of Artificial Sequence: Synthetic oligonucleotide
aatggtcacatgaaaatgcatgaat

SEQ ID NO: 168 - DNA, 25 bp, Artificial Sequence
  Description of Artificial Sequence: Synthetic oligonucleotide
aaccttggacagaggcagaactctt

SEQ ID NO: 169 - DNA, 25 bp, Artificial Sequence
  Description of Artificial Sequence: Synthetic oligonucleotide
cccagccctgtgtagttagagcaga

SEQ ID NO: 170 - DNA, 25 bp, Artificial Sequence
  Description of Artificial Sequence: Synthetic oligonucleotide
ggtgttggagatttggggtacaaat

SEQ ID NO: 171 - DNA, 23 bp, Artificial Sequence
  Description of Artificial Sequence: Synthetic oligonucleotide
cgatgatgagcagagcttcctgg

SEQ ID NO: 172 - DNA, 22 bp, Artificial Sequence
  Description of Artificial Sequence: Synthetic oligonucleotide
gtggttccatttccccttggat

SEQ ID NO: 173 - DNA, 24 bp, Artificial Sequence
  Description of Artificial Sequence: Synthetic oligonucleotide
caggaagtctggagtcgagcaaga

SEQ ID NO: 174 - DNA, 23 bp, Artificial Sequence
  Description of Artificial Sequence: Synthetic oligonucleotide
gtgagccactttgcctttctgaa

SEQ ID NO: 175 - DNA, 23 bp, Artificial Sequence
  Description of Artificial Sequence: Synthetic oligonucleotide
agatcatgtgggcatagggctca

SEQ ID NO: 176 - DNA, 22 bp, Artificial Sequence
  Description of Artificial Sequence: Synthetic oligonucleotide
accctctggctcatgttgggta

SEQ ID NO: 177 - DNA, 23 bp, Artificial Sequence
  Description of Artificial Sequence: Synthetic oligonucleotide
tgttgccaaatccaatggtcatt

SEQ ID NO: 178 - DNA, 26 bp, Artificial Sequence
  Description of Artificial Sequence: Synthetic oligonucleotide
ccacaatgtacacatcccaggatttt

SEQ ID NO: 179 - DNA, 25 bp, Artificial Sequence
  Description of Artificial Sequence: Synthetic oligonucleotide
ggaatattggtgtccatgggattta

SEQ ID NO: 180 - DNA, 25 bp, Artificial Sequence
  Description of Artificial Sequence: Synthetic oligonucleotide
gagtcgttgagtgtgaggaaagcta

SEQ ID NO: 181 - DNA, 25 bp, Artificial Sequence
  Description of Artificial Sequence: Synthetic oligonucleotide
gcttgaatcccatgtttacacccag

SEQ ID NO: 182 - DNA, 21 bp, Artificial Sequence
  Description of Artificial Sequence: Synthetic oligonucleotide
tccctttgggcttcagcacaa

SEQ ID NO: 183 - DNA, 24 bp, Artificial Sequence
  Description of Artificial Sequence: Synthetic oligonucleotide
gatttcaagccccaggtaggagta

SEQ ID NO: 184 - DNA, 22 bp, Artificial Sequence
  Description of Artificial Sequence: Synthetic oligonucleotide
accaactctaccccaagcccat

SEQ ID NO: 185 - DNA, 21 bp, Artificial Sequence
  Description of Artificial Sequence: Synthetic oligonucleotide
gggaaggtgacagtgaggggt

SEQ ID NO: 186 - DNA, 22 bp, Artificial Sequence
  Description of Artificial Sequence: Synthetic oligonucleotide
ttccatctggaccagtgccaca

SEQ ID NO: 187 - DNA, 26 bp, Artificial Sequence
  Description of Artificial Sequence: Synthetic oligonucleotide
tctccagagagtgtgtggagcaatat

SEQ ID NO: 188 - DNA, 26 bp, Artificial Sequence
  Description of Artificial Sequence: Synthetic oligonucleotide
tgggaagaggcagacgatagatacat

SEQ ID NO: 189 - DNA, 25 bp, Artificial Sequence
  Description of Artificial Sequence: Synthetic oligonucleotide
cctgtcacttgtaaccctgtgtgag

SEQ ID NO: 190 - DNA, 26 bp, Artificial Sequence
  Description of Artificial Sequence: Synthetic oligonucleotide
ccctgttgaagcagttaggtggtaat

SEQ ID NO: 191 - DNA, 24 bp, Artificial Sequence
  Description of Artificial Sequence: Synthetic oligonucleotide
gtcagagtaatggtgaggggcagt

SEQ ID NO: 192 - DNA, 21 bp, Artificial Sequence
  Description of Artificial Sequence: Synthetic oligonucleotide
ccgtctttgagatggggagct

SEQ ID NO: 193 - DNA, 26 bp, Artificial Sequence
  Description of Artificial Sequence: Synthetic oligonucleotide
tgtttacattcaactgcactgaccaa

SEQ ID NO: 194 - DNA, 25 bp, Artificial Sequence
  Description of Artificial Sequence: Synthetic oligonucleotide
tttgccctcaagattctttctttgt

SEQ ID NO: 195 - DNA, 23 bp, Artificial Sequence
  Description of Artificial Sequence: Synthetic oligonucleotide
aactggaatgagtcaggctggga

SEQ ID NO: 196 - DNA, 24 bp, Artificial Sequence
  Description of Artificial Sequence: Synthetic oligonucleotide
acccccaggacatcattaaatgta

SEQ ID NO: 197 - DNA, 26 bp, Artificial Sequence
  Description of Artificial Sequence: Synthetic oligonucleotide
ggtggtttggactgttattcccaatt

SEQ ID NO: 198 - DNA, 22 bp, Artificial Sequence
  Description of Artificial Sequence: Synthetic oligonucleotide
caaaggcttgctgcaatctgga

SEQ ID NO: 199 - DNA, 21 bp, Artificial Sequence
  Description of Artificial Sequence: Synthetic oligonucleotide
ggcagccaggaggactgtgag

SEQ ID NO: 200 - DNA, 25 bp, Artificial Sequence
  Description of Artificial Sequence: Synthetic oligonucleotide
cggtgtttccacagtatccatcact

SEQ ID NO: 201 - DNA, 23 bp, Artificial Sequence
  Description of Artificial Sequence: Synthetic oligonucleotide
ccctctgagcaccaaagtcaaaa

SEQ ID NO: 202 - DNA, 24 bp, Artificial Sequence
  Description of Artificial Sequence: Synthetic oligonucleotide
tcatctcatggtcctcttcgtgtg

SEQ ID NO: 203 - DNA, 25 bp, Artificial Sequence
  Description of Artificial Sequence: Synthetic oligonucleotide
ttttgcatcctctgattcagtcaat

SEQ ID NO: 204 - DNA, 22 bp, Artificial Sequence
  Description of Artificial Sequence: Synthetic oligonucleotide
cccccaaacaattccaccatgt

SEQ ID NO: 205 - DNA, 21 bp, Artificial Sequence
  Description of Artificial Sequence: Synthetic oligonucleotide
agaagggagtggctggtccct

SEQ ID NO: 206 - DNA, 21 bp, Artificial Sequence
  Description of Artificial Sequence: Synthetic oligonucleotide
cttgccaggaggaaccgtcaa

SEQ ID NO: 207 - DNA, 24 bp, Artificial Sequence
  Description of Artificial Sequence: Synthetic oligonucleotide
tcatcatgaccattctgctcacca

SEQ ID NO: 208 - DNA, 22 bp, Artificial Sequence
  Description of Artificial Sequence: Synthetic oligonucleotide
ctcatctgcctctgggcagaca

SEQ ID NO: 209 - DNA, 24 bp, Artificial Sequence
  Description of Artificial Sequence: Synthetic oligonucleotide
gcctgttttctttgagcatgtcca

SEQ ID NO: 210 - DNA, 23 bp, Artificial Sequence
  Description of Artificial Sequence: Synthetic oligonucleotide
atttgatgccttggccatcgact

SEQ ID NO: 211 - DNA, 21 bp, Artificial Sequence
  Description of Artificial Sequence: Synthetic oligonucleotide
caggagggccctgggtaagaa

SEQ ID NO: 212 - DNA, 26 bp, Artificial Sequence
  Description of Artificial Sequence: Synthetic oligonucleotide
ggaatacaccttgcatgacaggaaat

SEQ ID NO: 213 - DNA, 24 bp, Artificial Sequence
  Description of Artificial Sequence: Synthetic oligonucleotide
cccaacacacattaggtcctccaa

SEQ ID NO: 214 - DNA, 25 bp, Artificial Sequence
  Description of Artificial Sequence: Synthetic oligonucleotide
ttgaggggtgcattaacgtaagact

SEQ ID NO: 215 - DNA, 25 bp, Artificial Sequence
  Description of Artificial Sequence: Synthetic oligonucleotide
cacagagctcctaaaacccttgaaa

SEQ ID NO: 216 - DNA, 22 bp, Artificial Sequence
  Description of Artificial Sequence: Synthetic oligonucleotide
gggaaactcaaaggggctcaga

SEQ ID NO: 217 - DNA, 25 bp, Artificial Sequence
  Description of Artificial Sequence: Synthetic oligonucleotide
ttacagtttccccctttccaagaaa

SEQ ID NO: 218 - DNA, 26 bp, Artificial Sequence
  Description of Artificial Sequence: Synthetic oligonucleotide
cagcccactgaactacacattatggt

SEQ ID NO: 219 - DNA, 25 bp, Artificial Sequence
  Description of Artificial Sequence: Synthetic oligonucleotide
tgagttttggttctcccaaccttct

SEQ ID NO: 220 - DNA, 26 bp, Artificial Sequence
  Description of Artificial Sequence: Synthetic oligonucleotide
cctttctcaaactcatgtttttggca

SEQ ID NO: 221 - DNA, 21 bp, Artificial Sequence
  Description of Artificial Sequence: Synthetic oligonucleotide
catgtgctgggttgtccagca

SEQ ID NO: 222 - DNA, 22 bp, Artificial Sequence
  Description of Artificial Sequence: Synthetic oligonucleotide
gctggaacatcaaatgcccact

SEQ ID NO: 223 - DNA, 21 bp, Artificial Sequence
  Description of Artificial Sequence: Synthetic oligonucleotide
gatggtccagtccctgaccct

SEQ ID NO: 224 - DNA, 23 bp, Artificial Sequence
  Description of Artificial Sequence: Synthetic oligonucleotide
agcatctccaccctcccctagaa

SEQ ID NO: 225 - DNA, 25 bp, Artificial Sequence
  Description of Artificial Sequence: Synthetic oligonucleotide
tgcaatcactatcaaaatcccaaaa

SEQ ID NO: 226 - DNA, 24 bp, Artificial Sequence
  Description of Artificial Sequence: Synthetic oligonucleotide
aaccactcgtatctctccaccctt

SEQ ID NO: 227 - DNA, 26 bp, Artificial Sequence
  Description of Artificial Sequence: Synthetic oligonucleotide
ggtcttctgacttcaaatccagtgct

SEQ ID NO: 228 - DNA, 25 bp, Artificial Sequence
  Description of Artificial Sequence: Synthetic oligonucleotide
cctgcagtgagtagagccaagtttt

SEQ ID NO: 229 - DNA, 20 bp, Artificial Sequence
  Description of Artificial Sequence: Synthetic oligonucleotide
cgcccctgcccatttttagt

SEQ ID NO: 230 - DNA, 26 bp, Artificial Sequence
  Description of Artificial Sequence: Synthetic oligonucleotide
ggaacacagaaatggaatggaggtaa

SEQ ID NO: 231 - DNA, 23 bp, Artificial Sequence
  Description of Artificial Sequence: Synthetic oligonucleotide
gcacctgcatgtgtctgtgttct

SEQ ID NO: 232 - DNA, 25 bp, Artificial Sequence
  Description of Artificial Sequence: Synthetic oligonucleotide
gagggattgtctgaagagaagctgt

SEQ ID NO: 233 - DNA, 25 bp, Artificial Sequence
  Description of Artificial Sequence: Synthetic oligonucleotide
ggttgtcctctagaacacccacaca

SEQ ID NO: 234 - DNA, 21 bp, Artificial Sequence
  Description of Artificial Sequence: Synthetic oligonucleotide
ccaggaatgaggtcccccaaa

SEQ ID NO: 235 - DNA, 21 bp, Artificial Sequence
  Description of Artificial Sequence: Synthetic oligonucleotide
agcgtggtcttggatggcagg

SEQ ID NO: 236 - DNA, 24 bp, Artificial Sequence
  Description of Artificial Sequence: Synthetic oligonucleotide
tgaacaaaccaacattcaggctca

SEQ ID NO: 237 - DNA, 23 bp, Artificial Sequence
  Description of Artificial Sequence: Synthetic oligonucleotide
tctccaactatgtggcttgccca

SEQ ID NO: 238 - DNA, 23 bp, Artificial Sequence
  Description of Artificial Sequence: Synthetic oligonucleotide
caggtgtctcctaggcgcctatt

SEQ ID NO: 239 - DNA, 24 bp, Artificial Sequence
  Description of Artificial Sequence: Synthetic oligonucleotide
atgcaaattcccacatctgaaagt

SEQ ID NO: 240 - DNA, 23 bp, Artificial Sequence
  Description of Artificial Sequence: Synthetic oligonucleotide
cccagggtaacctacctccctca

SEQ ID NO: 241 - DNA, 22 bp, Artificial Sequence
  Description of Artificial Sequence: Synthetic oligonucleotide
tttttccctcccctgcattcat

SEQ ID NO: 242 - DNA, 26 bp, Artificial Sequence
  Description of Artificial Sequence: Synthetic oligonucleotide
gcattgacttcattgctcagctaaat

SEQ ID NO: 243 - DNA, 23 bp, Artificial Sequence
  Description of Artificial Sequence: Synthetic oligonucleotide
gaccctggttgggaggtcttgta

SEQ ID NO: 244 - DNA, 24 bp, Artificial Sequence
  Description of Artificial Sequence: Synthetic oligonucleotide
tgcacctgtgcttttatttcagga

SEQ ID NO: 245 - DNA, 25 bp, Artificial Sequence
  Description of Artificial Sequence: Synthetic oligonucleotide
gagatggggatccctgatttgtagt

SEQ ID NO: 246 - DNA, 24 bp, Artificial Sequence
  Description of Artificial Sequence: Synthetic oligonucleotide
ggaagccagtcacaggaggctaca

SEQ ID NO: 247 - DNA, 23 bp, Artificial Sequence
  Description of Artificial Sequence: Synthetic oligonucleotide
acaggctgggctagtggttgtga

SEQ ID NO: 248 - DNA, 21 bp, Artificial Sequence
  Description of Artificial Sequence: Synthetic oligonucleotide
ggaacaggcactggccatgtt

SEQ ID NO: 249 - DNA, 26 bp, Artificial Sequence
  Description of Artificial Sequence: Synthetic oligonucleotide
tcatttgaggattcaggtcaatgaat

SEQ ID NO: 250 - DNA, 23 bp, Artificial Sequence
  Description of Artificial Sequence: Synthetic oligonucleotide
ggagaacgaagacatcttggcat

SEQ ID NO: 251 - DNA, 24 bp, Artificial Sequence
  Description of Artificial Sequence: Synthetic oligonucleotide
tgaggaaaggactcttggctgaga

SEQ ID NO: 252 - DNA, 26 bp, Artificial Sequence
  Description of Artificial Sequence: Synthetic oligonucleotide
ttgacaaggcatgtccataagactca

SEQ ID NO: 253 - DNA, 23 bp, Artificial Sequence
  Description of Artificial Sequence: Synthetic oligonucleotide
cagacagtgcttcagagggcact

SEQ ID NO: 254 - DNA, 24 bp, Artificial Sequence
  Description of Artificial Sequence: Synthetic oligonucleotide
tggtgatagtggcatcgatgacta

SEQ ID NO: 255 - DNA, 25 bp, Artificial Sequence
  Description of Artificial Sequence: Synthetic oligonucleotide
gaatgccagtcagaatgcaaaatta

SEQ ID NO: 256 - DNA, 20 bp, Artificial Sequence
  Description of Artificial Sequence: Synthetic oligonucleotide
atcccccaccacccatgagt

SEQ ID NO: 257 - DNA, 26 bp, Artificial Sequence
  Description of Artificial Sequence: Synthetic oligonucleotide
agggaatctggtgtccttagatcact

SEQ ID NO: 258 - DNA, 26 bp, Artificial Sequence
  Description of Artificial Sequence: Synthetic oligonucleotide
tcaaagtttaggggaacatcgagata

SEQ ID NO: 259 - DNA, 25 bp, Artificial Sequence
  Description of Artificial Sequence: Synthetic oligonucleotide
cacagacctttcaaggactcacctt

SEQ ID NO: 260 - DNA, 25 bp, Artificial Sequence
  Description of Artificial Sequence: Synthetic oligonucleotide
gcacatcagtgatgaatgcaagaga

SEQ ID NO: 261 - DNA, 22 bp, Artificial Sequence
  Description of Artificial Sequence: Synthetic oligonucleotide
aaaggggagctggtatgtgcaa

SEQ ID NO: 262 - DNA, 26 bp, Artificial Sequence
  Description of Artificial Sequence: Synthetic oligonucleotide
gccaaacaagtctatgaggtcaccta

SEQ ID NO: 263 - DNA, 25 bp, Artificial Sequence
  Description of Artificial Sequence: Synthetic oligonucleotide
ttaaatctaggtaggaaagggcgga

SEQ ID NO: 264 - DNA, 25 bp, Artificial Sequence
  Description of Artificial Sequence: Synthetic oligonucleotide
tgctccataaggctctttagaagca

SEQ ID NO: 265 - DNA, 25 bp, Artificial Sequence
  Description of Artificial Sequence: Synthetic oligonucleotide
ttgtgagccaacaaatctatggcta

SEQ ID NO: 266 - DNA, 23 bp, Artificial Sequence
  Description of Artificial Sequence: Synthetic oligonucleotide
gggtggctatagggctggaaaat

SEQ ID NO: 267 - DNA, 25 bp, Artificial Sequence
  Description of Artificial Sequence: Synthetic oligonucleotide
tccttgaaaaccagagttcttggta

SEQ ID NO: 268 - DNA, 23 bp, Artificial Sequence
  Description of Artificial Sequence: Synthetic oligonucleotide
agtggagctgactggtccgagaa

SEQ ID NO: 269 - DNA, 26 bp, Artificial Sequence
  Description of Artificial Sequence: Synthetic oligonucleotide
gcatttccctaaaggacattgattct

SEQ ID NO: 270 - DNA, 25 bp, Artificial Sequence
  Description of Artificial Sequence: Synthetic oligonucleotide
tttcaggcaaaggacttcaagacta

SEQ ID NO: 271 - DNA, 21 bp, Artificial Sequence
  Description of Artificial Sequence: Synthetic oligonucleotide
aaagcatcaccatggcccaaa

SEQ ID NO: 272 - DNA, 25 bp, Artificial Sequence
  Description of Artificial Sequence: Synthetic oligonucleotide
ttcccttcacttgctttcctttctt

SEQ ID NO: 273 - DNA, 26 bp, Artificial Sequence
  Description of Artificial Sequence: Synthetic oligonucleotide
cagatattttgtcacctgcagcaaca

SEQ ID NO: 274 - DNA, 23 bp, Artificial Sequence
  Description of Artificial Sequence: Synthetic oligonucleotide
tctcataaggatggcatccaggt

SEQ ID NO: 275 - DNA, 26 bp, Artificial Sequence
  Description of Artificial Sequence: Synthetic oligonucleotide
ttccatattggtgtcatgacaatcaa

SEQ ID NO: 276 - DNA, 24 bp, Artificial Sequence
  Description of Artificial Sequence: Synthetic oligonucleotide
tctgtccttagccagggaccttct

SEQ ID NO: 277 - DNA, 23 bp, Artificial Sequence
  Description of Artificial Sequence: Synthetic oligonucleotide
gaaatctcccctcactgccaaaa

SEQ ID NO: 278 - DNA, 20 bp, Artificial Sequence
  Description of Artificial Sequence: Synthetic oligonucleotide
cagggcagctgtggtcccta

SEQ ID NO: 279 - DNA, 26 bp, Artificial Sequence
  Description of Artificial Sequence: Synthetic oligonucleotide
ccattcttcttccactcttcacagat

SEQ ID NO: 280 - DNA, 24 bp, Artificial Sequence
  Description of Artificial Sequence: Synthetic oligonucleotide
agcagtcacactccaaaagagggt

SEQ ID NO: 281 - DNA, 27 bp, Artificial Sequence
  Description of Artificial Sequence: Synthetic oligonucleotide
cctagactgggctttttaacactggaa

SEQ ID NO: 282 - DNA, 23 bp, Artificial Sequence
  Description of Artificial Sequence: Synthetic oligonucleotide
agtgtccaaatctccatcgtgct

SEQ ID NO: 283 - DNA, 26 bp, Artificial Sequence
  Description of Artificial Sequence: Synthetic oligonucleotide
tcattgctggttatttatgcctcagt

SEQ ID NO: 284 - DNA, 24 bp, Artificial Sequence
  Description of Artificial Sequence: Synthetic oligonucleotide
aacgcaggatggatataggtgaaa

SEQ ID NO: 285 - DNA, 24 bp, Artificial Sequence
  Description of Artificial Sequence: Synthetic oligonucleotide
gacatcttcacgcacagaaggagg

SEQ ID NO: 286 - DNA, 23 bp, Artificial Sequence
  Description of Artificial Sequence: Synthetic oligonucleotide
ccccaccttttgcctatggaagg

SEQ ID NO: 287 - DNA, 25 bp, Artificial Sequence
  Description of Artificial Sequence: Synthetic oligonucleotide
cctagttaagtggcaagatgcccat

SEQ ID NO: 288 - DNA, 24 bp, Artificial Sequence
  Description of Artificial Sequence: Synthetic oligonucleotide
ggctgacttcaggggtggagtaaa

SEQ ID NO: 289 - DNA, 26 bp, Artificial Sequence
  Description of Artificial Sequence: Synthetic oligonucleotide
tgtggataaggggaaccactgtatat

SEQ ID NO: 290 - DNA, 26 bp, Artificial Sequence
  Description of Artificial Sequence: Synthetic oligonucleotide
tgggtttttgttgatctgaggaactt

SEQ ID NO: 291 - DNA, 25 bp, Artificial Sequence
  Description of Artificial Sequence: Synthetic oligonucleotide
ccaaaacagaatttggaaaatccaa

SEQ ID NO: 292 - DNA, 25 bp, Artificial Sequence
  Description of Artificial Sequence: Synthetic oligonucleotide
tgctgatggaaagacaactttgttt

SEQ ID NO: 293 - DNA, 22 bp, Artificial Sequence
  Description of Artificial Sequence: Synthetic oligonucleotide
gcccagcaccatctgtgtgatt

SEQ ID NO: 294 - DNA, 25 bp, Artificial Sequence
  Description of Artificial Sequence: Synthetic oligonucleotide
aatcgtcagcctcttcagaatgagt

SEQ ID NO: 295 - DNA, 25 bp, Artificial Sequence
  Description of Artificial Sequence: Synthetic oligonucleotide
cctaggggacaggcatgtgttaaac

SEQ ID NO: 296 - DNA, 20 bp, Artificial Sequence
  Description of Artificial Sequence: Synthetic oligonucleotide
gctcccgtgtcggtgtctct

SEQ ID NO: 297 - DNA, 26 bp, Artificial Sequence
  Description of Artificial Sequence: Synthetic oligonucleotide
catggatgaagaacttgcaaaaaaat

SEQ ID NO: 298 - DNA, 25 bp, Artificial Sequence
  Description of Artificial Sequence: Synthetic oligonucleotide
aagaaaatgtctatggcaaagggct

SEQ ID NO: 299 - DNA, 23 bp, Artificial Sequence
  Description of Artificial Sequence: Synthetic oligonucleotide
tctgagagtctgggtggtgctct

SEQ ID NO: 300 - DNA, 26 bp, Artificial Sequence
  Description of Artificial Sequence: Synthetic oligonucleotide
tgttaagaatgaacccagggtatcat

SEQ ID NO: 301 - DNA, 24 bp, Artificial Sequence
  Description of Artificial Sequence: Synthetic oligonucleotide
gagcatccagtggcacactgtaga

SEQ ID NO: 302 - DNA, 25 bp, Artificial Sequence
  Description of Artificial Sequence: Synthetic oligonucleotide
gtaagaaccatgggtgtgaaccatt

SEQ ID NO: 303 - DNA, 26 bp, Artificial Sequence
  Description of Artificial Sequence: Synthetic oligonucleotide
ctcatggagttacaaaaccaacacca

SEQ ID NO: 304 - DNA, 24 bp, Artificial Sequence
  Description of Artificial Sequence: Synthetic oligonucleotide
tccaggtatggaatacaggggaca

SEQ ID NO: 305 - DNA, 20 bp, Artificial Sequence
  Description of Artificial Sequence: Synthetic oligonucleotide
gggactgggaggaagcagga

SEQ ID NO: 306 - DNA, 25 bp, Artificial Sequence
  Description of Artificial Sequence: Synthetic oligonucleotide
tcatggactgttcatcgtgtagtga

SEQ ID NO: 307 - DNA, 23 bp, Artificial Sequence
  Description of Artificial Sequence: Synthetic oligonucleotide
ggagatggtctggcatctgtgag

SEQ ID NO: 308 - DNA, 26 bp, Artificial Sequence
  Description of Artificial Sequence: Synthetic oligonucleotide
caagcaggaaagagaatgactctgat

SEQ ID NO: 309 - DNA, 25 bp, Artificial Sequence
  Description of Artificial Sequence: Synthetic oligonucleotide
ttaaggttgctattcggctgacttt

SEQ ID NO: 310 - DNA, 25 bp, Artificial Sequence
  Description of Artificial Sequence: Synthetic oligonucleotide
agggttacctccttttgttggaaca

SEQ ID NO: 311 - DNA, 23 bp, Artificial Sequence
  Description of Artificial Sequence: Synthetic oligonucleotide
tcctgagccccagtttctgaaat

SEQ ID NO: 312 - DNA, 24 bp, Artificial Sequence
  Description of Artificial Sequence: Synthetic oligonucleotide
cccaagaaggcacagactgtttct

SEQ ID NO: 313 - DNA, 26 bp, Artificial Sequence
  Description of Artificial Sequence: Synthetic oligonucleotide
cctggagggttcatagtctaatggga

SEQ ID NO: 314 - DNA, 27 bp, Artificial Sequence
  Description of Artificial Sequence: Synthetic oligonucleotide
cgagctatggactctgcattaggagac

SEQ ID NO: 315 - DNA, 22 bp, Artificial Sequence
  Description of Artificial Sequence: Synthetic oligonucleotide
ctctgctgcctggtcctcacta

SEQ ID NO: 316 - DNA, 24 bp, Artificial Sequence
  Description of Artificial Sequence: Synthetic oligonucleotide
gggagaccagggactcctctgata

SEQ ID NO: 317 - DNA, 26 bp, Artificial Sequence
  Description of Artificial Sequence: Synthetic oligonucleotide
gatgtgagatctgagactgaacccat

SEQ ID NO: 318 - DNA, 26 bp, Artificial Sequence
  Description of Artificial Sequence: Synthetic oligonucleotide
agagccctagggtcctagaagagaga

SEQ ID NO: 319 - DNA, 25 bp, Artificial Sequence
  Description of Artificial Sequence: Synthetic oligonucleotide
gacaggaccatgagggtaggagata

SEQ ID NO: 320 - DNA, 27 bp, Artificial Sequence
  Description of Artificial Sequence: Synthetic oligonucleotide
tgagtctctctgtccactgtgacattt

SEQ ID NO: 321 - DNA, 20 bp, Artificial Sequence
  Description of Artificial Sequence: Synthetic oligonucleotide
gcctcaagggaagccccagt

SEQ ID NO: 322 - DNA, 25 bp, Artificial Sequence
  Description of Artificial Sequence: Synthetic oligonucleotide
cctgctgtgtctttggagaaattca

SEQ ID NO: 323 - DNA, 26 bp, Artificial Sequence
  Description of Artificial Sequence: Synthetic oligonucleotide
tctatccccatcctctccagatagtt

SEQ ID NO: 324 - DNA, 24 bp, Artificial Sequence
  Description of Artificial Sequence: Synthetic oligonucleotide
cagacaccccttgtctcttgggtg

SEQ ID NO: 325 - DNA, 27 bp, Artificial Sequence
  Description of Artificial Sequence: Synthetic oligonucleotide
tgataaaaggcacctacaaaaacccta

SEQ ID NO: 326 - DNA, 25 bp, Artificial Sequence
  Description of Artificial Sequence: Synthetic oligonucleotide
tggggagaaacatttgacatctttt

SEQ ID NO: 327 - DNA, 25 bp, Artificial Sequence
  Description of Artificial Sequence: Synthetic oligonucleotide
ttggatttagggaaaaggaaatgca

SEQ ID NO: 328 - DNA, 21 bp, Artificial Sequence
  Description of Artificial Sequence: Synthetic oligonucleotide
atggaaaggcgagaggcacca

SEQ ID NO: 329 - DNA, 26 bp, Artificial Sequence
  Description of Artificial Sequence: Synthetic oligonucleotide
tctcaccggtacaaaccctaaaagtt

SEQ ID NO: 330 - DNA, 21 bp, Artificial Sequence
  Description of Artificial Sequence: Synthetic oligonucleotide
gtgggctctgaccaggtccta

SEQ ID NO: 331 - DNA, 21 bp, Artificial Sequence
  Description of Artificial Sequence: Synthetic oligonucleotide
cacacagggttcccagggctt

SEQ ID NO: 332 - DNA, 25 bp, Artificial Sequence
  Description of Artificial Sequence: Synthetic oligonucleotide
acatttgtctgtgaaattggaccca

SEQ ID NO: 333 - DNA, 25 bp, Artificial Sequence
  Description of Artificial Sequence: Synthetic oligonucleotide
acatatgcaaagggacaagaatgaa

SEQ ID NO: 334 - DNA, 25 bp, Artificial Sequence
  Description of Artificial Sequence: Synthetic oligonucleotide
ggttaacttttgagcaccctggcta

SEQ ID NO: 335 - DNA, 23 bp, Artificial Sequence
  Description of Artificial Sequence: Synthetic oligonucleotide
gaggcttcccaataagctgcaga

SEQ ID NO: 336 - DNA, 25 bp, Artificial Sequence
  Description of Artificial Sequence: Synthetic oligonucleotide
gcacagatgcaagtaggtgaacaga

SEQ ID NO: 337 - DNA, 27 bp, Artificial Sequence
  Description of Artificial Sequence: Synthetic oligonucleotide
gagtctccctagtgtaaccttgaccca

SEQ ID NO: 338 - DNA, 21 bp, Artificial Sequence
  Description of Artificial Sequence: Synthetic oligonucleotide
gagtcagtgcaggagccctga

SEQ ID NO: 339 - DNA, 22 bp, Artificial Sequence
  Description of Artificial Sequence: Synthetic oligonucleotide
aggcccattgcacaggacagtt

SEQ ID NO: 340 - DNA, 26 bp, Artificial Sequence
  Description of Artificial Sequence: Synthetic oligonucleotide
acaaacaggcattttgcactattctt

SEQ ID NO: 341 - DNA, 23 bp, Artificial Sequence
  Description of Artificial Sequence: Synthetic oligonucleotide
gtccttactccaaggcaagggtt

SEQ ID NO: 342 - DNA, 21 bp, Artificial Sequence
  Description of Artificial Sequence: Synthetic oligonucleotide
agagggaggggccaggaggtt

SEQ ID NO: 343 - DNA, 27 bp, Artificial Sequence
  Description of Artificial Sequence: Synthetic oligonucleotide
cattggtcaggaaaagagaaacagaga

SEQ ID NO: 344 - DNA, 27 bp, Artificial Sequence
  Description of Artificial Sequence: Synthetic oligonucleotide
tgagttaggtgtggtcagaggaagaca

SEQ ID NO: 345 - DNA, 26 bp, Artificial Sequence
  Description of Artificial Sequence: Synthetic oligonucleotide
cccaccctatcctgtagttagggaaa

SEQ ID NO: 346 - DNA, 26 bp, Artificial Sequence
  Description of Artificial Sequence: Synthetic oligonucleotide
tctgtgtagatttgaagtcccaacat

SEQ ID NO: 347 - DNA, 26 bp, Artificial Sequence
  Description of Artificial Sequence: Synthetic oligonucleotide
tgactgtccagcatcatctctgagta

SEQ ID NO: 348 - DNA, 23 bp, Artificial Sequence
  Description of Artificial Sequence: Synthetic oligonucleotide
gctccttcgtgcctagcaatgtt

SEQ ID NO: 349 - DNA, 22 bp, Artificial Sequence
  Description of Artificial Sequence: Synthetic oligonucleotide
gctccaccctcaagcacttgga

SEQ ID NO: 350 - DNA, 26 bp, Artificial Sequence
  Description of Artificial Sequence: Synthetic oligonucleotide
gagatcgatcgaagactgtgaaagtt

SEQ ID NO: 351 - DNA, 26 bp, Artificial Sequence
  Description of Artificial Sequence: Synthetic oligonucleotide
cagctttgttgttgaaggatgtttta

SEQ ID NO: 352 - DNA, 26 bp, Artificial Sequence
  Description of Artificial Sequence: Synthetic oligonucleotide
tgggaacacactggcccattatataa

SEQ ID NO: 353 - DNA, 26 bp, Artificial Sequence
  Description of Artificial Sequence: Synthetic oligonucleotide
aatcatcgatttcatggtctttgaca

SEQ ID NO: 354 - DNA, 24 bp, Artificial Sequence
  Description of Artificial Sequence: Synthetic oligonucleotide
tcctgcacacttcagcacaaaact

SEQ ID NO: 355 - DNA, 24 bp, Artificial Sequence
  Description of Artificial Sequence: Synthetic oligonucleotide
tcgggtttttcattgaaagtcatt

SEQ ID NO: 356 - DNA, 24 bp, Artificial Sequence
  Description of Artificial Sequence: Synthetic oligonucleotide
tcacagcagtgggaatcaaagtga

SEQ ID NO: 357 - DNA, 21 bp, Artificial Sequence
  Description of Artificial Sequence: Synthetic oligonucleotide
cctccacaagacccaccctga

SEQ ID NO: 358 - DNA, 20 bp, Artificial Sequence
  Description of Artificial Sequence: Synthetic oligonucleotide
ctgggaccctgtgtgccaga

SEQ ID NO: 359 - DNA, 26 bp, Artificial Sequence
  Description of Artificial Sequence: Synthetic oligonucleotide
ctccagtaggtcattcagatctccat

SEQ ID NO: 360 - DNA, 27 bp, Artificial Sequence
  Description of Artificial Sequence: Synthetic oligonucleotide
gctgcagaacaaattcgaaagttaaaa

SEQ ID NO: 361 - DNA, 23 bp, Artificial Sequence
  Description of Artificial Sequence: Synthetic oligonucleotide
ctagaaaggggttgcagggttgt

SEQ ID NO: 362 - DNA, 27 bp, Artificial Sequence
  Description of Artificial Sequence: Synthetic oligonucleotide
gcagtgctccaagacaagaaatttatt

SEQ ID NO: 363 - DNA, 21 bp, Artificial Sequence
  Description of Artificial Sequence: Synthetic oligonucleotide
ggtttcctgctggacaggggt

SEQ ID NO: 364 - DNA, 25 bp, Artificial Sequence
  Description of Artificial Sequence: Synthetic oligonucleotide
gctcaggagagagaagggaggaaaa

SEQ ID NO: 365 - DNA, 20 bp, Artificial Sequence
  Description of Artificial Sequence: Synthetic oligonucleotide
cgactgggctgcagccctat

SEQ ID NO: 366 - DNA, 27 bp, Artificial Sequence
  Description of Artificial Sequence: Synthetic oligonucleotide
cagagtcattctctttcctgcttgtct

SEQ ID NO: 367 - DNA, 27 bp, Artificial Sequence
  Description of Artificial Sequence: Synthetic oligonucleotide
gcagccattcacactatacatttttgt

SEQ ID NO: 368 - DNA, 25 bp, Artificial Sequence
  Description of Artificial Sequence: Synthetic oligonucleotide
gctggatgaggtcatctccaaatat

SEQ ID NO: 369 - DNA, 25 bp, Artificial Sequence
  Description of Artificial Sequence: Synthetic oligonucleotide
cctgctacgtgactgttctctccat

SEQ ID NO: 370 - DNA, 26 bp, Artificial Sequence
  Description of Artificial Sequence: Synthetic oligonucleotide
tttctctgacttgggctgacaattac

SEQ ID NO: 371 - DNA, 22 bp, Artificial Sequence
  Description of Artificial Sequence: Synthetic oligonucleotide
tctgtgcgtctgcacaaactct

SEQ ID NO: 372 - DNA, 27 bp, Artificial Sequence
  Description of Artificial Sequence: Synthetic oligonucleotide
gccaaatcaacttttggagattttcta

SEQ ID NO: 373 - DNA, 25 bp, Artificial Sequence
  Description of Artificial Sequence: Synthetic oligonucleotide
tttcctctcatacgggagctttctt

SEQ ID NO: 374 - DNA, 22 bp, Artificial Sequence
  Description of Artificial Sequence: Synthetic oligonucleotide
ccccacctcagtgtccctcaga

SEQ ID NO: 375 - DNA, 26 bp, Artificial Sequence
  Description of Artificial Sequence: Synthetic oligonucleotide
tttaaaaagctgggctgatcttacaa

SEQ ID NO: 376 - DNA, 22 bp, Artificial Sequence
  Description of Artificial Sequence: Synthetic oligonucleotide
ctgtggcagaacagagctgcca

SEQ ID NO: 377 - DNA, 24 bp, Artificial Sequence
  Description of Artificial Sequence: Synthetic oligonucleotide
tgtgaggggtaggttttccttcct

SEQ ID NO: 378 - DNA, 23 bp, Artificial Sequence
  Description of Artificial Sequence: Synthetic oligonucleotide
cctttgggcagtgattaggtcat

SEQ ID NO: 379 - DNA, 27 bp, Artificial Sequence
  Description of Artificial Sequence: Synthetic oligonucleotide
caatctgatgtgcaaggtaattccatt

SEQ ID NO: 380 - DNA, 21 bp, Artificial Sequence
  Description of Artificial Sequence: Synthetic oligonucleotide
cttcgtgagagcccaggctga

SEQ ID NO: 381 - DNA, 21 bp, Artificial Sequence
  Description of Artificial Sequence: Synthetic oligonucleotide
ctggtacctgcgcattgcaga

SEQ ID NO: 382 - DNA, 23 bp, Artificial Sequence
  Description of Artificial Sequence: Synthetic oligonucleotide
cttgccatgaggttgggttgatt

SEQ ID NO: 383 - DNA, 26 bp, Artificial Sequence
  Description of Artificial Sequence: Synthetic oligonucleotide
tcaacaggaatttccttcaggataaa

SEQ ID NO: 384 - DNA, 21 bp, Artificial Sequence
  Description of Artificial Sequence: Synthetic oligonucleotide
ggtgggagcagctgaagtgat

SEQ ID NO: 385 - DNA, 23 bp, Artificial Sequence
  Description of Artificial Sequence: Synthetic oligonucleotide
aatcacaacatcgtgccacagta

SEQ ID NO: 386 - DNA, 24 bp, Artificial Sequence
  Description of Artificial Sequence: Synthetic oligonucleotide
ccaggaagtctgcattatcacgaa

SEQ ID NO: 387 - DNA, 22 bp, Artificial Sequence
  Description of Artificial Sequence: Synthetic oligonucleotide
ggtaatctcccaaggccctgct

SEQ ID NO: 388 - DNA, 26 bp, Artificial Sequence
  Description of Artificial Sequence: Synthetic oligonucleotide
caatggcagtggctagaaagagtaaa

SEQ ID NO: 389 - DNA, 26 bp, Artificial Sequence
  Description of Artificial Sequence: Synthetic oligonucleotide
aaggctcaatgaaaggataatctcca

SEQ ID NO: 390 - DNA, 27 bp, Artificial Sequence
  Description of Artificial Sequence: Synthetic oligonucleotide
gaacaaaaactggatgagatttccctt

SEQ ID NO: 391 - DNA, 26 bp, Artificial Sequence
  Description of Artificial Sequence: Synthetic oligonucleotide
gatttccaggaaggaggaagtagagt

SEQ ID NO: 392 - DNA, 22 bp, Artificial Sequence
  Description of Artificial Sequence: Synthetic oligonucleotide
cagcccatggttctgcatctct

SEQ ID NO: 393 - DNA, 21 bp, Artificial Sequence
  Description of Artificial Sequence: Synthetic oligonucleotide
cagggccacattgggacactt

SEQ ID NO: 394 - DNA, 26 bp, Artificial Sequence
  Description of Artificial Sequence: Synthetic oligonucleotide
gttcaccttttccccataggttagta

SEQ ID NO: 395 - DNA, 23 bp, Artificial Sequence
  Description of Artificial Sequence: Synthetic oligonucleotide
aatagccttggcagtaaacgcca

SEQ ID NO: 396 - DNA, 23 bp, Artificial Sequence
  Description of Artificial Sequence: Synthetic oligonucleotide
cccaaagggaaacatccctcata

SEQ ID NO: 397 - DNA, 21 bp, Artificial Sequence
  Description of Artificial Sequence: Synthetic oligonucleotide
aaagaatgccacggattgcca

SEQ ID NO: 398 - DNA, 20 bp, Artificial Sequence
  Description of Artificial Sequence: Synthetic oligonucleotide
ccttcctgtacggggcccta

SEQ ID NO: 399 - DNA, 20 bp, Artificial Sequence
  Description of Artificial Sequence: Synthetic oligonucleotide
agctcctccatgtgcctgct

SEQ ID NO: 400 - DNA, 27 bp, Artificial Sequence
  Description of Artificial Sequence: Synthetic oligonucleotide
tgagagcccagaacatgcatataaagg

SEQ ID NO: 401 - DNA, 19 bp, Artificial Sequence
  Description of Artificial Sequence: Synthetic oligonucleotide
ccaccacgtccggcagttt

SEQ ID NO: 402 - DNA, 27 bp, Artificial Sequence
  Description of Artificial Sequence: Synthetic oligonucleotide
tgtgttcaaataaggatacacccagct

SEQ ID NO: 403 - DNA, 26 bp, Artificial Sequence
  Description of Artificial Sequence: Synthetic oligonucleotide
tgagaaagtgccctagaacctgtaca

SEQ ID NO: 404 - DNA, 26 bp, Artificial Sequence
  Description of Artificial Sequence: Synthetic oligonucleotide
tgtgagttctctgtacggggaagttt

SEQ ID NO: 405 - DNA, 26 bp, Artificial Sequence
  Description of Artificial Sequence: Synthetic oligonucleotide
tgtgagttctctgtacggggaagttt

SEQ ID NO: 406 - DNA, 24 bp, Artificial Sequence
  Description of Artificial Sequence: Synthetic oligonucleotide
gggcaacttactcttcctggcatg

SEQ ID NO: 407 - DNA, 22 bp, Artificial Sequence
  Description of Artificial Sequence: Synthetic oligonucleotide
ccagggtaagtggcaccacagg

SEQ ID NO: 408 - DNA, 20 bp, Artificial Sequence
  Description of Artificial Sequence: Synthetic oligonucleotide
cccctatgcctcccactcct

SEQ ID NO: 409 - DNA, 19 bp, Artificial Sequence
  Description of Artificial Sequence: Synthetic oligonucleotide
cctgcggtccccaggttcc

SEQ ID NO: 410 - DNA, 23 bp, Artificial Sequence
  Description of Artificial Sequence: Synthetic oligonucleotide
tttaggtcccatctgctcgctct

SEQ ID NO: 411 - DNA, 27 bp, Artificial Sequence
  Description of Artificial Sequence: Synthetic oligonucleotide
ccttcatagctggactccataaagaca

SEQ ID NO: 412 - DNA, 26 bp, Artificial Sequence
  Description of Artificial Sequence: Synthetic oligonucleotide
tccaaatgtcccctagttcacaataa

SEQ ID NO: 413 - DNA, 20 bp, Artificial Sequence
  Description of Artificial Sequence: Synthetic oligonucleotide
cagctattgccagccaccga

SEQ ID NO: 414 - DNA, 22 bp, Artificial Sequence
  Description of Artificial Sequence: Synthetic oligonucleotide
cctgggccactgaagcaaaaga

SEQ ID NO: 415 - DNA, 26 bp, Artificial Sequence
  Description of Artificial Sequence: Synthetic oligonucleotide
ccttgattcagagctcagatggatga

SEQ ID NO: 416 - DNA, 26 bp, Artificial Sequence
  Description of Artificial Sequence: Synthetic oligonucleotide
tcacactgcaaatctctatgctcaga

SEQ ID NO: 417 - DNA, 27 bp, Artificial Sequence
  Description of Artificial Sequence: Synthetic oligonucleotide
tttccacatgtgtcaaatgtaggacta

SEQ ID NO: 418 - DNA, 27 bp, Artificial Sequence
  Description of Artificial Sequence: Synthetic oligonucleotide
gctggaaatacaggtacacctggaaat

SEQ ID NO: 419 - DNA, 19 bp, Artificial Sequence
  Description of Artificial Sequence: Synthetic oligonucleotide
ccagcgggacccaaggaaa

SEQ ID NO: 420 - DNA, 27 bp, Artificial Sequence
  Description of Artificial Sequence: Synthetic oligonucleotide
tgtgtttaaaggcacatatgtgctttt

SEQ ID NO: 421 - DNA, 23 bp, Artificial Sequence
  Description of Artificial Sequence: Synthetic oligonucleotide
ccatccccactgtcctcaagaga

SEQ ID NO: 422 - DNA, 22 bp, Artificial Sequence
  Description of Artificial Sequence: Synthetic oligonucleotide
agcactctggagaaagccgggt

SEQ ID NO: 423 - DNA, 22 bp, Artificial Sequence
  Description of Artificial Sequence: Synthetic oligonucleotide
acaaggttcatggcctgggaaa

SEQ ID NO: 424 - DNA, 24 bp, Artificial Sequence
  Description of Artificial Sequence: Synthetic oligonucleotide
tctgagtccctgagaacctagggt

SEQ ID NO: 425 - DNA, 26 bp, Artificial Sequence
  Description of Artificial Sequence: Synthetic oligonucleotide
ctgaggagagacacacacctgtgtat

SEQ ID NO: 426 - DNA, 25 bp, Artificial Sequence
  Description of Artificial Sequence: Synthetic oligonucleotide
caatttccaaacctgaagtgttgga

SEQ ID NO: 427 - DNA, 25 bp, Artificial Sequence
  Description of Artificial Sequence: Synthetic oligonucleotide
tgaacttgtcctgagaatgaaggtg

SEQ ID NO: 428 - DNA, 25 bp, Artificial Sequence
  Description of Artificial Sequence: Synthetic oligonucleotide
taagaaatctttgtgaagctgccat

SEQ ID NO: 429 - DNA, 24 bp, Artificial Sequence
  Description of Artificial Sequence: Synthetic oligonucleotide
ttggaggctccccaaatattttgt

SEQ ID NO: 430 - DNA, 23 bp, Artificial Sequence
  Description of Artificial Sequence: Synthetic oligonucleotide
cctgtgcaggaccaggttctttt

SEQ ID NO: 431 - DNA, 21 bp, Artificial Sequence
  Description of Artificial Sequence: Synthetic oligonucleotide
cacctggggactcctgtgtgt

SEQ ID NO: 432 - DNA, 22 bp, Artificial Sequence
  Description of Artificial Sequence: Synthetic oligonucleotide
aacatcccccacagctgtcaga

SEQ ID NO: 433 - DNA, 22 bp, Artificial Sequence
  Description of Artificial Sequence: Synthetic oligonucleotide
cagggcccagagtgcttagaga

SEQ ID NO: 434 - DNA, 28 bp, Artificial Sequence
  Description of Artificial Sequence: Synthetic oligonucleotide
caaggaagtgaatgacttgtacactgga

SEQ ID NO: 435 - DNA, 23 bp, Artificial Sequence
  Description of Artificial Sequence: Synthetic oligonucleotide
tggtgaaggtcgtgtccctgtaa

SEQ ID NO: 436 - DNA, 20 bp, Artificial Sequence
  Description of Artificial Sequence: Synthetic oligonucleotide
gacagaccatggccatggca

SEQ ID NO: 437 - DNA, 22 bp, Artificial Sequence
  Description of Artificial Sequence: Synthetic oligonucleotide
atcacctattgcccaacgcgtg

SEQ ID NO: 438 - DNA, 26 bp, Artificial Sequence
  Description of Artificial Sequence: Synthetic oligonucleotide
cctcatcaggaaaacctaaagtggga

SEQ ID NO: 439 - DNA, 24 bp, Artificial Sequence
  Description of Artificial Sequence: Synthetic oligonucleotide
cagatcctggtttgtgtggcttta

SEQ ID NO: 440 - DNA, 27 bp, Artificial Sequence
  Description of Artificial Sequence: Synthetic oligonucleotide
tggcttgaagattagggaaatagtgtt

SEQ ID NO: 441 - DNA, 23 bp, Artificial Sequence
  Description of Artificial Sequence: Synthetic oligonucleotide
ccagttcagggacggagattcct

SEQ ID NO: 442 - DNA, 28 bp, Artificial Sequence
  Description of Artificial Sequence: Synthetic oligonucleotide
caatcctgctaatgtgagtcagattgtt

SEQ ID NO: 443 - DNA, 26 bp, Artificial Sequence
  Description of Artificial Sequence: Synthetic oligonucleotide
aggatactggaagggaactcactcta

SEQ ID NO: 444 - DNA, 23 bp, Artificial Sequence
  Description of Artificial Sequence: Synthetic oligonucleotide
attggtccctgagcttagcccta

SEQ ID NO: 445 - DNA, 24 bp, Artificial Sequence
  Description of Artificial Sequence: Synthetic oligonucleotide
ctgcccagcaagaaactcagatta

SEQ ID NO: 446 - DNA, 23 bp, Artificial Sequence
  Description of Artificial Sequence: Synthetic oligonucleotide
agctctgccgtttgacctgtgtc

SEQ ID NO: 447 - DNA, 25 bp, Artificial Sequence
  Description of Artificial Sequence: Synthetic oligonucleotide
ttctggaaattgaaggaaggaaact

SEQ ID NO: 448 - DNA, 24 bp, Artificial Sequence
  Description of Artificial Sequence: Synthetic oligonucleotide
cttcctcactcagcctgcttcaca

SEQ ID NO: 449 - DNA, 19 bp, Artificial Sequence
  Description of Artificial Sequence: Synthetic oligonucleotide
ccctgggcactgtcgctgg

SEQ ID NO: 450 - DNA, 23 bp, Artificial Sequence
  Description of Artificial Sequence: Synthetic oligonucleotide
cctccatgactcaaggcacagat

SEQ ID NO: 451 - DNA, 25 bp, Artificial Sequence
  Description of Artificial Sequence: Synthetic oligonucleotide
aaaatggaaatggcctaaatgtcca

SEQ ID NO: 452 - DNA, 23 bp, Artificial Sequence
  Description of Artificial Sequence: Synthetic oligonucleotide
atgcctggacccttgtctgtttt

SEQ ID NO: 453 - DNA, 27 bp, Artificial Sequence
  Description of Artificial Sequence: Synthetic oligonucleotide
cccagactttcacatacacattcatca

SEQ ID NO: 454 - DNA, 20 bp, Artificial Sequence
  Description of Artificial Sequence: Synthetic oligonucleotide
ggagaatggacccccaggga

SEQ ID NO: 455 - DNA, 28 bp, Artificial Sequence
  Description of Artificial Sequence: Synthetic oligonucleotide
tgctagactctccataggatgctgaata

SEQ ID NO: 456 - DNA, 27 bp, Artificial Sequence
  Description of Artificial Sequence: Synthetic oligonucleotide
tgaaaaaaggtaagtttccctgtgatt

SEQ ID NO: 457 - DNA, 23 bp, Artificial Sequence
  Description of Artificial Sequence: Synthetic oligonucleotide
cctctgcttcccttttgtttgca

SEQ ID NO: 458 - DNA, 24 bp, Artificial Sequence
  Description of Artificial Sequence: Synthetic oligonucleotide
cacagacaccttcctgccctagta

SEQ ID NO: 459 - DNA, 28 bp, Artificial Sequence
  Description of Artificial Sequence: Synthetic oligonucleotide
gaagaagcaattcactgactcctttctt

SEQ ID NO: 460 - DNA, 24 bp, Artificial Sequence
  Description of Artificial Sequence: Synthetic oligonucleotide
tctctcagttccacagggctgttt

SEQ ID NO: 461 - DNA, 22 bp, Artificial Sequence
  Description of Artificial Sequence: Synthetic oligonucleotide
cctcaccccttccctacctgaa

SEQ ID NO: 462 - DNA, 26 bp, Artificial Sequence
  Description of Artificial Sequence: Synthetic oligonucleotide
tctttcgctctggtttttaatgagat

SEQ ID NO: 463 - DNA, 28 bp, Artificial Sequence
  Description of Artificial Sequence: Synthetic oligonucleotide
catcacttagctaaagggacaagctcta

SEQ ID NO: 464 - DNA, 25 bp, Artificial Sequence
  Description of Artificial Sequence: Synthetic oligonucleotide
gttcctttctccttagtgccatgaa

SEQ ID NO: 465 - DNA, 26 bp, Artificial Sequence
  Description of Artificial Sequence: Synthetic oligonucleotide
ttctactggcatgaagacagacagag

SEQ ID NO: 466 - DNA, 27 bp, Artificial Sequence
  Description of Artificial Sequence: Synthetic oligonucleotide
tggtcataaaatgaataaagcactggt

SEQ ID NO: 467 - DNA, 27 bp, Artificial Sequence
  Description of Artificial Sequence: Synthetic oligonucleotide
ttggtctcttctgaagatttcacaaaa

SEQ ID NO: 468 - DNA, 25 bp, Artificial Sequence
  Description of Artificial Sequence: Synthetic oligonucleotide
tgagaagaactgctgctctccctat

SEQ ID NO: 469 - DNA, 24 bp, Artificial Sequence
  Description of Artificial Sequence: Synthetic oligonucleotide
aaagaagggcaatggaagaaggat

SEQ ID NO: 470 - DNA, 21 bp, Artificial Sequence
  Description of Artificial Sequence: Synthetic oligonucleotide
aaaccagaaggcccccaggtc

SEQ ID NO: 471 - DNA, 22 bp, Artificial Sequence
  Description of Artificial Sequence: Synthetic oligonucleotide
acatcatgggcctcaattgcta

SEQ ID NO: 472 - DNA, 21 bp, Artificial Sequence
  Description of Artificial Sequence: Synthetic oligonucleotide
ggaggtttccggtgtcagcta

SEQ ID NO: 473 - DNA, 26 bp, Artificial Sequence
  Description of Artificial Sequence: Synthetic oligonucleotide
tctgcttagttaaggaagttccgaat

SEQ ID NO: 474 - DNA, 28 bp, Artificial Sequence
  Description of Artificial Sequence: Synthetic oligonucleotide
ggaaaggctggagaatttaagaacaaat

SEQ ID NO: 475 - DNA, 27 bp, Artificial Sequence
  Description of Artificial Sequence: Synthetic oligonucleotide
cgtacccagagtggagtgaacaatctc

SEQ ID NO: 476 - DNA, 23 bp, Artificial Sequence
  Description of Artificial Sequence: Synthetic oligonucleotide
tgatttctggaatggatgcctga

SEQ ID NO: 477 - DNA, 22 bp, Artificial Sequence
  Description of Artificial Sequence: Synthetic oligonucleotide
agtccagtccagggctgcatca

SEQ ID NO: 478 - DNA, 23 bp, Artificial Sequence
  Description of Artificial Sequence: Synthetic oligonucleotide
gcgtcaacattcccaatgtgtgt

SEQ ID NO: 479 - DNA, 25 bp, Artificial Sequence
  Description of Artificial Sequence: Synthetic oligonucleotide
actgttttttacctccacagggttc

SEQ ID NO: 480 - DNA, 22 bp, Artificial Sequence
  Description of Artificial Sequence: Synthetic oligonucleotide
ccaagacacacgtgacccacca

SEQ ID NO: 481 - DNA, 22 bp, Artificial Sequence
  Description of Artificial Sequence: Synthetic oligonucleotide
acaaggggtgtctgctgctgta

SEQ ID NO: 482 - DNA, 27 bp, Artificial Sequence
  Description of Artificial Sequence: Synthetic oligonucleotide
tcacttttccagacaaaatacatggat

SEQ ID NO: 483 - DNA, 24 bp, Artificial Sequence
  Description of Artificial Sequence: Synthetic oligonucleotide
tttggcttcatagctgggaagaaa

SEQ ID NO: 484 - DNA, 26 bp, Artificial Sequence
  Description of Artificial Sequence: Synthetic oligonucleotide
catcttccaggttttccatatcctta

SEQ ID NO: 485 - DNA, 24 bp, Artificial Sequence
  Description of Artificial Sequence: Synthetic oligonucleotide
cagcatcctaggagctgaccacat

SEQ ID NO: 486 - DNA, 26 bp, Artificial Sequence
  Description of Artificial Sequence: Synthetic oligonucleotide
tgttctacacccagagtcacaaactg

SEQ ID NO: 487 - DNA, 23 bp, Artificial Sequence
  Description of Artificial Sequence: Synthetic oligonucleotide
ggtggtccacccaacagacaaca

SEQ ID NO: 488 - DNA, 24 bp, Artificial Sequence
  Description of Artificial Sequence: Synthetic oligonucleotide
caagtcagcgttaatagggggcaa

SEQ ID NO: 489 - DNA, 21 bp, Artificial Sequence
  Description of Artificial Sequence: Synthetic oligonucleotide
ccttgtgctaggccaggctga

SEQ ID NO: 490 - DNA, 25 bp, Artificial Sequence
  Description of Artificial Sequence: Synthetic oligonucleotide
tgtaactgattttccctccaagggt

SEQ ID NO: 491 - DNA, 28 bp, Artificial Sequence
  Description of Artificial Sequence: Synthetic oligonucleotide
caaatgttacctactaagggatgcctga

SEQ ID NO: 492 - DNA, 24 bp, Artificial Sequence
  Description of Artificial Sequence: Synthetic oligonucleotide
gctgagcagctgctgagtattgct

SEQ ID NO: 493 - DNA, 24 bp, Artificial Sequence
  Description of Artificial Sequence: Synthetic oligonucleotide
cagggttggagatctgttgatgaa

SEQ ID NO: 494 - DNA, 24 bp, Artificial Sequence
  Description of Artificial Sequence: Synthetic oligonucleotide
tcagggacttcgagggctattgta

SEQ ID NO: 495 - DNA, 26 bp, Artificial Sequence
  Description of Artificial Sequence: Synthetic oligonucleotide
cattagcaatttcacaatcttggggt

SEQ ID NO: 496 - DNA, 25 bp, Artificial Sequence
  Description of Artificial Sequence: Synthetic oligonucleotide
ccagatgtctgaaaggttgaagcca

SEQ ID NO: 497 - DNA, 24 bp, Artificial Sequence
  Description of Artificial Sequence: Synthetic oligonucleotide
atacagctggccctgtatttgtgt

SEQ ID NO: 498 - DNA, 22 bp, Artificial Sequence
  Description of Artificial Sequence: Synthetic oligonucleotide
gagagacaccccagagccctga

SEQ ID NO: 499 - DNA, 23 bp, Artificial Sequence
  Description of Artificial Sequence: Synthetic oligonucleotide
tatttcagtgagctgccccatca

SEQ ID NO: 500 - DNA, 26 bp, Artificial Sequence
  Description of Artificial Sequence: Synthetic oligonucleotide
tcttcaataaaggaaaccaaggagaa

SEQ ID NO: 501 - DNA, 26 bp, Artificial Sequence
  Description of Artificial Sequence: Synthetic oligonucleotide
tttccaaccactgacagtttaacaaa

SEQ ID NO: 502 - DNA, 25 bp, Artificial Sequence
  Description of Artificial Sequence: Synthetic oligonucleotide
cctccagaccctgacttttccttca

SEQ ID NO: 503 - DNA, 25 bp, Artificial Sequence
  Description of Artificial Sequence: Synthetic oligonucleotide
tcgaacctcaccttctgtctagaga

SEQ ID NO: 504 - DNA, 22 bp, Artificial Sequence
  Description of Artificial Sequence: Synthetic oligonucleotide
gcagggccttgggagattaccg

SEQ ID NO: 505 - DNA, 20 bp, Artificial Sequence
  Description of Artificial Sequence: Synthetic oligonucleotide
ggtggagcaggagcccacat

SEQ ID NO: 506 - DNA, 26 bp, Artificial Sequence
  Description of Artificial Sequence: Synthetic oligonucleotide
ttaatttcctctcttgagtgtggctt

SEQ ID NO: 507 - DNA, 25 bp, Artificial Sequence
  Description of Artificial Sequence: Synthetic oligonucleotide
gcttctttgcttctcaaacacccat

SEQ ID NO: 508 - DNA, 23 bp, Artificial Sequence
  Description of Artificial Sequence: Synthetic oligonucleotide
ccacatccacttggattccagga

SEQ ID NO: 509 - DNA, 22 bp, Artificial Sequence
  Description of Artificial Sequence: Synthetic oligonucleotide
gtcagtggcctcactgtcagca

SEQ ID NO: 510 - DNA, 28 bp, Artificial Sequence
  Description of Artificial Sequence: Synthetic oligonucleotide
gctatcacaaataatgctgcaaagacaa

SEQ ID NO: 511 - DNA, 26 bp, Artificial Sequence
  Description of Artificial Sequence: Synthetic oligonucleotide
tgagagacaactgagagacattccat

SEQ ID NO: 512 - DNA, 23 bp, Artificial Sequence
  Description of Artificial Sequence: Synthetic oligonucleotide
tcttggcccaatctctctccact

SEQ ID NO: 513 - DNA, 22 bp, Artificial Sequence
  Description of Artificial Sequence: Synthetic oligonucleotide
actccccccttatggagtccca

SEQ ID NO: 514 - DNA, 23 bp, Artificial Sequence
  Description of Artificial Sequence: Synthetic oligonucleotide
gcatatgagggcacacctggtta

SEQ ID NO: 515 - DNA, 25 bp, Artificial Sequence
  Description of Artificial Sequence: Synthetic oligonucleotide
cttgaatgaaggacaacatgcatgt

SEQ ID NO: 516 - DNA, 25 bp, Artificial Sequence
  Description of Artificial Sequence: Synthetic oligonucleotide
catcttgaatcctgctggtcactca

SEQ ID NO: 517 - DNA, 22 bp, Artificial Sequence
  Description of Artificial Sequence: Synthetic oligonucleotide
ctcccttccagaggtgcagctt

SEQ ID NO: 518 - DNA, 23 bp, Artificial Sequence
  Description of Artificial Sequence: Synthetic oligonucleotide
atagtggctctcctcgtcgtcct

SEQ ID NO: 519 - DNA, 28 bp, Artificial Sequence
  Description of Artificial Sequence: Synthetic oligonucleotide
tgagactgtacgaattttatgactgcat

SEQ ID NO: 520 - DNA, 22 bp, Artificial Sequence
  Description of Artificial Sequence: Synthetic oligonucleotide
gacagtgcccagggctctgata

SEQ ID NO: 521 - DNA, 24 bp, Artificial Sequence
  Description of Artificial Sequence: Synthetic oligonucleotide
tggcccattctcctgactctttaa

SEQ ID NO: 522 - DNA, 28 bp, Artificial Sequence
  Description of Artificial Sequence: Synthetic oligonucleotide
gctatatctgctcagagctcacaaatgt

SEQ ID NO: 523 - DNA, 27 bp, Artificial Sequence
  Description of Artificial Sequence: Synthetic oligonucleotide
ttccagagccagctaagaatagtacaa

SEQ ID NO: 524 - DNA, 21 bp, Artificial Sequence
  Description of Artificial Sequence: Synthetic oligonucleotide
cacaatgacacccacccctca

SEQ ID NO: 525 - DNA, 20 bp, Artificial Sequence
  Description of Artificial Sequence: Synthetic oligonucleotide
gacccccattccctgcctta

SEQ ID NO: 526 - DNA, 28 bp, Artificial Sequence
  Description of Artificial Sequence: Synthetic oligonucleotide
tcagagaactcagaggagtgactcttct

SEQ ID NO: 527 - DNA, 24 bp, Artificial Sequence
  Description of Artificial Sequence: Synthetic oligonucleotide
gtcgttttcctggcactgtttctt

SEQ ID NO: 528 - DNA, 28 bp, Artificial Sequence
  Description of Artificial Sequence: Synthetic oligonucleotide
tccttttacattatttgtctccccagtt

SEQ ID NO: 529 - DNA, 25 bp, Artificial Sequence
  Description of Artificial Sequence: Synthetic oligonucleotide
agatggggtaaggagacgaatgaga

SEQ ID NO: 530 - DNA, 22 bp, Artificial Sequence
  Description of Artificial Sequence: Synthetic oligonucleotide
ggctcactcctcatgccattca

SEQ ID NO: 531 - DNA, 26 bp, Artificial Sequence
  Description of Artificial Sequence: Synthetic oligonucleotide
ggaaaatgctgctgacttgtttttgt

SEQ ID NO: 532 - DNA, 21 bp, Artificial Sequence
  Description of Artificial Sequence: Synthetic oligonucleotide
gtcccttcccacaaggccata

SEQ ID NO: 533 - DNA, 25 bp, Artificial Sequence
  Description of Artificial Sequence: Synthetic oligonucleotide
taagattcaagacagggcacagtca

SEQ ID NO: 534 - DNA, 24 bp, Artificial Sequence
  Description of Artificial Sequence: Synthetic oligonucleotide
cctgcagttgccttcaatgactct

SEQ ID NO: 535 - DNA, 28 bp, Artificial Sequence
  Description of Artificial Sequence: Synthetic oligonucleotide
cattctcccttgaacctcaactctatct

SEQ ID NO: 536 - DNA, 22 bp, Artificial Sequence
  Description of Artificial Sequence: Synthetic oligonucleotide
gtgggaggggttcagaagcagg

SEQ ID NO: 537 - DNA, 25 bp, Artificial Sequence
  Description of Artificial Sequence: Synthetic oligonucleotide
tcagaaaaggtaactgggcatgaca

SEQ ID NO: 538 - DNA, 24 bp, Artificial Sequence
  Description of Artificial Sequence: Synthetic oligonucleotide
gctcaatgatggggaaggaaaagg

SEQ ID NO: 539 - DNA, 28 bp, Artificial Sequence
  Description of Artificial Sequence: Synthetic oligonucleotide
tgggtgagttactttacttctgtggtca

SEQ ID NO: 540 - DNA, 25 bp, Artificial Sequence
  Description of Artificial Sequence: Synthetic oligonucleotide
acactttatttgttccccagtctgg

SEQ ID NO: 541 - DNA, 26 bp, Artificial Sequence
  Description of Artificial Sequence: Synthetic oligonucleotide
gctccccaaggcatagtttaatatgt

SEQ ID NO: 542 - DNA, 25 bp, Artificial Sequence
  Description of Artificial Sequence: Synthetic oligonucleotide
tctcttcatccctgttcttcacatt

SEQ ID NO: 543 - DNA, 19 bp, Artificial Sequence
  Description of Artificial Sequence: Synthetic oligonucleotide
gcggccccaataccatcca

SEQ ID NO: 544 - DNA, 23 bp, Artificial Sequence
  Description of Artificial Sequence: Synthetic oligonucleotide
gatgactggcgtgctcctaacaa

SEQ ID NO: 545 - DNA, 28 bp, Artificial Sequence
  Description of Artificial Sequence: Synthetic oligonucleotide
cctagtaagagtcatgctgagggaagat

SEQ ID NO: 546 - DNA, 21 bp, Artificial Sequence
  Description of Artificial Sequence: Synthetic oligonucleotide
ctcgagggcgtttttccttga

SEQ ID NO: 547 - DNA, 24 bp, Artificial Sequence
  Description of Artificial Sequence: Synthetic oligonucleotide
cctggtcattgatctggaaaggat

SEQ ID NO: 548 - DNA, 23 bp, Artificial Sequence
  Description of Artificial Sequence: Synthetic oligonucleotide
tttaggccagatttggtggctca

SEQ ID NO: 549 - DNA, 24 bp, Artificial Sequence
  Description of Artificial Sequence: Synthetic oligonucleotide
gagatctacaggcgatcagggaga

SEQ ID NO: 550 - DNA, 19 bp, Artificial Sequence
  Description of Artificial Sequence: Synthetic oligonucleotide
ggccacgagggagaagcaa

SEQ ID NO: 551 - DNA, 23 bp, Artificial Sequence
  Description of Artificial Sequence: Synthetic oligonucleotide
cctcctgcctcatcatgaccaca

SEQ ID NO: 552 - DNA, 25 bp, Artificial Sequence
  Description of Artificial Sequence: Synthetic oligonucleotide
tgtacaggagctttggaatactggt

SEQ ID NO: 553 - DNA, 25 bp, Artificial Sequence
  Description of Artificial Sequence: Synthetic oligonucleotide
ggaaggtggcaatacagaaaaaaaa

SEQ ID NO: 554 - DNA, 27 bp, Artificial Sequence
  Description of Artificial Sequence: Synthetic oligonucleotide
tgctagtatctgtatttggtgctgtgt

SEQ ID NO: 555 - DNA, 28 bp, Artificial Sequence
  Description of Artificial Sequence: Synthetic oligonucleotide
tcatatcttttggcaccttctagaatgt

SEQ ID NO: 556 - DNA, 27 bp, Artificial Sequence
  Description of Artificial Sequence: Synthetic oligonucleotide
ggcctgtcctaaggagatgtatgagtt

SEQ ID NO: 557 - DNA, 22 bp, Artificial Sequence
  Description of Artificial Sequence: Synthetic oligonucleotide
aacagcagcagccgcaacatat

SEQ ID NO: 558 - DNA, 24 bp, Artificial Sequence
  Description of Artificial Sequence: Synthetic oligonucleotide
cacctgcaacagactcagcacaga

SEQ ID NO: 559 - DNA, 22 bp, Artificial Sequence
  Description of Artificial Sequence: Synthetic oligonucleotide
gtttttcctgatcccgccctga

SEQ ID NO: 560 - DNA, 22 bp, Artificial Sequence
  Description of Artificial Sequence: Synthetic oligonucleotide
gctctgcctctaggacccacat

SEQ ID NO: 561 - DNA, 28 bp, Artificial Sequence
  Description of Artificial Sequence: Synthetic oligonucleotide
gggttctttgcattcggtatttaataca

SEQ ID NO: 562 - DNA, 23 bp, Artificial Sequence
  Description of Artificial Sequence: Synthetic oligonucleotide
ggggggtctgaaaggaagagtca

SEQ ID NO: 563 - DNA, 28 bp, Artificial Sequence
  Description of Artificial Sequence: Synthetic oligonucleotide
cctgtcagtggtgacaaataacacttaa

SEQ ID NO: 564 - DNA, 23 bp, Artificial Sequence
  Description of Artificial Sequence: Synthetic oligonucleotide
agactcaggggacagtcccatct

SEQ ID NO: 565 - DNA, 21 bp, Artificial Sequence
  Description of Artificial Sequence: Synthetic oligonucleotide
ccgacccccgagagagagatt

SEQ ID NO: 566 - DNA, 26 bp, Artificial Sequence
  Description of Artificial Sequence: Synthetic oligonucleotide
ttcttgcatacacactggaaaaaaat

SEQ ID NO: 567 - DNA, 28 bp, Artificial Sequence
  Description of Artificial Sequence: Synthetic oligonucleotide
cctgtttgttgtctaacgaacaatcagt

SEQ ID NO: 568 - DNA, 22 bp, Artificial Sequence
  Description of Artificial Sequence: Synthetic oligonucleotide
ccccctccttcagacaccctca

SEQ ID NO: 569 - DNA, 24 bp, Artificial Sequence
  Description of Artificial Sequence: Synthetic oligonucleotide
ttcccttctgcattcagggtatga

SEQ ID NO: 570 - DNA, 25 bp, Artificial Sequence
  Description of Artificial Sequence: Synthetic oligonucleotide
aatggtcatgatgatgcacacaatc

SEQ ID NO: 571 - DNA, 20 bp, Artificial Sequence
  Description of Artificial Sequence: Synthetic oligonucleotide
ttgaccacgaccttggccct

SEQ ID NO: 572 - DNA, 24 bp, Artificial Sequence
  Description of Artificial Sequence: Synthetic oligonucleotide
cacacacctcaattcccattgagc

SEQ ID NO: 573 - DNA, 25 bp, Artificial Sequence
  Description of Artificial Sequence: Synthetic oligonucleotide
catatgaattttgggacggcatata

SEQ ID NO: 574 - DNA, 20 bp, Artificial Sequence
  Description of Artificial Sequence: Synthetic oligonucleotide
cggtctcctccagcccctct

SEQ ID NO: 575 - DNA, 23 bp, Artificial Sequence
  Description of Artificial Sequence: Synthetic oligonucleotide
actgtggagggaagggagacctg

SEQ ID NO: 576 - DNA, 21 bp, Artificial Sequence
  Description of Artificial Sequence: Synthetic oligonucleotide
gccacctcttgaggggtgtca

SEQ ID NO: 577 - DNA, 27 bp, Artificial Sequence
  Description of Artificial Sequence: Synthetic oligonucleotide
gctggtataggcaaatgtttacagaat

SEQ ID NO: 578 - DNA, 22 bp, Artificial Sequence
  Description of Artificial Sequence: Synthetic oligonucleotide
ctgtcctgggctgggtcctcta

SEQ ID NO: 579 - DNA, 26 bp, Artificial Sequence
  Description of Artificial Sequence: Synthetic oligonucleotide
gctttgcagacaccattcaatcttaa

SEQ ID NO: 580 - DNA, 23 bp, Artificial Sequence
  Description of Artificial Sequence: Synthetic oligonucleotide
cagcctttgcctgaatcacaaaa

SEQ ID NO: 581 - DNA, 26 bp, Artificial Sequence
  Description of Artificial Sequence: Synthetic oligonucleotide
tctcaaaataaccgtctcatgaggta

SEQ ID NO: 582 - DNA, 23 bp, Artificial Sequence
  Description of Artificial Sequence: Synthetic oligonucleotide
tcctgaggttgtttccaggctgt

SEQ ID NO: 583 - DNA, 28 bp, Artificial Sequence
  Description of Artificial Sequence: Synthetic oligonucleotide
aagcatgacaaacaaaatcatttaccta

SEQ ID NO: 584 - DNA, 22 bp, Artificial Sequence
  Description of Artificial Sequence: Synthetic oligonucleotide
gcagaaagactcgggtttccca

SEQ ID NO: 585 - DNA, 24 bp, Artificial Sequence
  Description of Artificial Sequence: Synthetic oligonucleotide
gaacctggtcagatcccacagaac

SEQ ID NO: 586 - DNA, 22 bp, Artificial Sequence
  Description of Artificial Sequence: Synthetic oligonucleotide
cccctggaaagggttccaagtc

SEQ ID NO: 587 - DNA, 26 bp, Artificial Sequence
  Description of Artificial Sequence: Synthetic oligonucleotide
tgtataaatgtgcccaaaagcgttac

SEQ ID NO: 588 - DNA, 23 bp, Artificial Sequence
  Description of Artificial Sequence: Synthetic oligonucleotide
tctcacctagatggctgcagctg

SEQ ID NO: 589 - DNA, 21 bp, Artificial Sequence
  Description of Artificial Sequence: Synthetic oligonucleotide
ctcaaccacccttggggatgt

SEQ ID NO: 590 - DNA, 25 bp, Artificial Sequence
  Description of Artificial Sequence: Synthetic oligonucleotide
gagacaaggtttactggatgtgcca

SEQ ID NO: 591 - DNA, 24 bp, Artificial Sequence
  Description of Artificial Sequence: Synthetic oligonucleotide
gtgctagagataggctggtcccag

SEQ ID NO: 592 - DNA, 24 bp, Artificial Sequence
  Description of Artificial Sequence: Synthetic oligonucleotide
actccaagtcctgaggttgtccaa

SEQ ID NO: 593 - DNA, 20 bp, Artificial Sequence
  Description of Artificial Sequence: Synthetic oligonucleotide
caggtggaggggagggatga

SEQ ID NO: 594 - DNA, 27 bp, Artificial Sequence
  Description of Artificial Sequence: Synthetic oligonucleotide
ttccatagatttggcccttaaataaaa

SEQ ID NO: 595 - DNA, 20 bp, Artificial Sequence
  Description of Artificial Sequence: Synthetic oligonucleotide
ggaagggtgactccagcggt

SEQ ID NO: 596 - DNA, 24 bp, Artificial Sequence
  Description of Artificial Sequence: Synthetic oligonucleotide
caggtgggtccagtgtagtcacca

SEQ ID NO: 597 - DNA, 27 bp, Artificial Sequence
  Description of Artificial Sequence: Synthetic oligonucleotide
gaatatactggcacataagccaaggaa

SEQ ID NO: 598 - DNA, 26 bp, Artificial Sequence
  Description of Artificial Sequence: Synthetic oligonucleotide
caaatgattagccccatttcacagaa

SEQ ID NO: 599 - DNA, 23 bp, Artificial Sequence
  Description of Artificial Sequence: Synthetic oligonucleotide
caggggtttcccagttgagaagg

SEQ ID NO: 600 - DNA, 23 bp, Artificial Sequence
  Description of Artificial Sequence: Synthetic oligonucleotide
ttttgttgcagccacccataata

SEQ ID NO: 601 - DNA, 20 bp, Artificial Sequence
  Description of Artificial Sequence: Synthetic oligonucleotide
atccctgcacatgccctggt

SEQ ID NO: 602 - DNA, 22 bp, Artificial Sequence
  Description of Artificial Sequence: Synthetic oligonucleotide
gcctcaaggtggctaagctcca

SEQ ID NO: 603 - DNA, 27 bp, Artificial Sequence
  Description of Artificial Sequence: Synthetic oligonucleotide
cgttgtataacaggctacctctgtgtt

SEQ ID NO: 604 - DNA, 26 bp, Artificial Sequence
  Description of Artificial Sequence: Synthetic oligonucleotide
gcagttccaccactaatgtgctttat

SEQ ID NO: 605 - DNA, 25 bp, Artificial Sequence
  Description of Artificial Sequence: Synthetic oligonucleotide
tgaaacacttccttgaggcttcaga

SEQ ID NO: 606 - DNA, 28 bp, Artificial Sequence
  Description of Artificial Sequence: Synthetic oligonucleotide
gcaaacaaatttctaaggactgattgtt

SEQ ID NO: 607 - DNA, 26 bp, Artificial Sequence
  Description of Artificial Sequence: Synthetic oligonucleotide
ggctagtcaagtaaagcagtgggagt

SEQ ID NO: 608 - DNA, 22 bp, Artificial Sequence
  Description of Artificial Sequence: Synthetic oligonucleotide
cagaggacacgccatagctggg

SEQ ID NO: 609 - DNA, 28 bp, Artificial Sequence
  Description of Artificial Sequence: Synthetic oligonucleotide
tttgctaacacacacagaaaagaaatgt

SEQ ID NO: 610 - DNA, 24 bp, Artificial Sequence
  Description of Artificial Sequence: Synthetic oligonucleotide
tcttccctagtgtgcaagtccctt

SEQ ID NO: 611 - DNA, 27 bp, Artificial Sequence
  Description of Artificial Sequence: Synthetic oligonucleotide
caggaaattcttcttcacagcttttgt

SEQ ID NO: 612 - DNA, 22 bp, Artificial Sequence
  Description of Artificial Sequence: Synthetic oligonucleotide
cctctcccggtgtctgattcct

SEQ ID NO: 613 - DNA, 26 bp, Artificial Sequence
  Description of Artificial Sequence: Synthetic oligonucleotide
tgggggaatattcatctatacccaga

SEQ ID NO: 614 - DNA, 18 bp, Artificial Sequence
  Description of Artificial Sequence: Synthetic oligonucleotide
gcccggccctgatagcca

SEQ ID NO: 615 - DNA, 20 bp, Artificial Sequence
  Description of Artificial Sequence: Synthetic oligonucleotide
cagcctccccagggtctcac

SEQ ID NO: 616 - DNA, 29 bp, Artificial Sequence
  Description of Artificial Sequence: Synthetic oligonucleotide
ccatgtcactgaatccaacagtacattat

SEQ ID NO: 617 - DNA, 24 bp, Artificial Sequence
  Description of Artificial Sequence: Synthetic oligonucleotide
cattgctttgtcccagcaagttgt

SEQ ID NO: 618 - DNA, 19 bp, Artificial Sequence
  Description of Artificial Sequence: Synthetic oligonucleotide
gggctgtagggggcgacca

SEQ ID NO: 619 - DNA, 23 bp, Artificial Sequence
  Description of Artificial Sequence: Synthetic oligonucleotide
cctggtttgggtcaggtattgca

SEQ ID NO: 620 - DNA, 22 bp, Artificial Sequence
  Description of Artificial Sequence: Synthetic oligonucleotide
tttccttcaaaagcgggctgta

SEQ ID NO: 621 - DNA, 26 bp, Artificial Sequence
  Description of Artificial Sequence: Synthetic oligonucleotide
aaagggaaatgtgaactatcttgctt

SEQ ID NO: 622 - DNA, 28 bp, Artificial Sequence
  Description of Artificial Sequence: Synthetic oligonucleotide
tttgatcattacaagaacggtatgaaaa

SEQ ID NO: 623 - DNA, 25 bp, Artificial Sequence
  Description of Artificial Sequence: Synthetic oligonucleotide
cctttgcagaaacaaagtcagggta

SEQ ID NO: 624 - DNA, 20 bp, Artificial Sequence
  Description of Artificial Sequence: Synthetic oligonucleotide
gggagaggacggccattcca

SEQ ID NO: 625 - DNA, 27 bp, Artificial Sequence
  Description of Artificial Sequence: Synthetic oligonucleotide
tttttaacattgtattaggctgtgcct

SEQ ID NO: 626 - DNA, 23 bp, Artificial Sequence
  Description of Artificial Sequence: Synthetic oligonucleotide
tgttacctagcccctttgccaca

SEQ ID NO: 627 - DNA, 20 bp, Artificial Sequence
  Description of Artificial Sequence: Synthetic oligonucleotide
gtggggaagccgaaaggaga

SEQ ID NO: 628 - DNA, 22 bp, Artificial Sequence
  Description of Artificial Sequence: Synthetic oligonucleotide
gcatggaagggcaggtctgaaa

SEQ ID NO: 629 - DNA, 24 bp, Artificial Sequence
  Description of Artificial Sequence: Synthetic oligonucleotide
ctctgtcacccatgctgtagttca

SEQ ID NO: 630 - DNA, 28 bp, Artificial Sequence
  Description of Artificial Sequence: Synthetic oligonucleotide
ggggtttcagattcactctactgaagat

SEQ ID NO: 631 - DNA, 22 bp, Artificial Sequence
  Description of Artificial Sequence: Synthetic oligonucleotide
gatttccaaggacccagaccca

SEQ ID NO: 632 - DNA, 23 bp, Artificial Sequence
  Description of Artificial Sequence: Synthetic oligonucleotide
cagctccactgcaatggattcct

SEQ ID NO: 633 - DNA, 27 bp, Artificial Sequence
  Description of Artificial Sequence: Synthetic oligonucleotide
tgttacagacaattcagactgcaaaaa

SEQ ID NO: 634 - DNA, 23 bp, Artificial Sequence
  Description of Artificial Sequence: Synthetic oligonucleotide
agggtagaagcccagaacccagg

SEQ ID NO: 635 - DNA, 29 bp, Artificial Sequence
  Description of Artificial Sequence: Synthetic oligonucleotide
ccccagagtcagtttctatcatatcatca

SEQ ID NO: 636 - DNA, 22 bp, Artificial Sequence
  Description of Artificial Sequence: Synthetic oligonucleotide
agaagcagcagcaccagggaaa

SEQ ID NO: 637 - DNA, 23 bp, Artificial Sequence
  Description of Artificial Sequence: Synthetic oligonucleotide
ggtgaggatgcaagatgcaagtt

SEQ ID NO: 638 - DNA, 26 bp, Artificial Sequence
  Description of Artificial Sequence: Synthetic oligonucleotide
aaaatatgtggtcaaagaaaagggga

SEQ ID NO: 639 - DNA, 20 bp, Artificial Sequence
  Description of Artificial Sequence: Synthetic oligonucleotide
accacctcctgccccacctt

SEQ ID NO: 640 - DNA, 23 bp, Artificial Sequence
  Description of Artificial Sequence: Synthetic oligonucleotide
ccgcttttgaaggaaaatgagga

SEQ ID NO: 641 - DNA, 28 bp, Artificial Sequence
  Description of Artificial Sequence: Synthetic oligonucleotide
agaagtgtggagaaggaatcactagagc

SEQ ID NO: 642 - DNA, 22 bp, Artificial Sequence
  Description of Artificial Sequence: Synthetic oligonucleotide
ggctggactgttcccacactca

SEQ ID NO: 643 - DNA, 20 bp, Artificial Sequence
  Description of Artificial Sequence: Synthetic oligonucleotide
gccccagaaccccttccaca

SEQ ID NO: 644 - DNA, 20 bp, Artificial Sequence
  Description of Artificial Sequence: Synthetic oligonucleotide
gtagccccctgtgacccccg

SEQ ID NO: 645 - DNA, 24 bp, Artificial Sequence
  Description of Artificial Sequence: Synthetic oligonucleotide
actagggtgaggcctcagaagacc

SEQ ID NO: 646 - DNA, 22 bp, Artificial Sequence
  Description of Artificial Sequence: Synthetic oligonucleotide
aaatgagggcagtcccactcca

SEQ ID NO: 647 - DNA, 24 bp, Artificial Sequence
  Description of Artificial Sequence: Synthetic oligonucleotide
ggaatctgtgcttggtcagtggaa

SEQ ID NO: 648 - DNA, 27 bp, Artificial Sequence
  Description of Artificial Sequence: Synthetic oligonucleotide
tggcactatctgtaccatcatacaact

SEQ ID NO: 649 - DNA, 20 bp, Artificial Sequence
  Description of Artificial Sequence: Synthetic oligonucleotide
ctgaaggcaggccaacgtgg

SEQ ID NO: 650 - DNA, 28 bp, Artificial Sequence
  Description of Artificial Sequence: Synthetic oligonucleotide
ggaaggggttaacagaagaagtcagtga

SEQ ID NO: 651 - DNA, 29 bp, Artificial Sequence
  Description of Artificial Sequence: Synthetic oligonucleotide
ggattgtaatattgccagctttgtaaagt

SEQ ID NO: 652 - DNA, 24 bp, Artificial Sequence
  Description of Artificial Sequence: Synthetic oligonucleotide
catcgggacctaggtgtgttctca

SEQ ID NO: 653 - DNA, 23 bp, Artificial Sequence
  Description of Artificial Sequence: Synthetic oligonucleotide
gagggtttccctggacacatctt

SEQ ID NO: 654 - DNA, 18 bp, Artificial Sequence
  Description of Artificial Sequence: Synthetic oligonucleotide
gggacagagcgcgtgcgg

SEQ ID NO: 655 - DNA, 21 bp, Artificial Sequence
  Description of Artificial Sequence: Synthetic oligonucleotide
atgaggccctgcagggaaaca

SEQ ID NO: 656 - DNA, 29 bp, Artificial Sequence
  Description of Artificial Sequence: Synthetic oligonucleotide
cattcaacaaggacagagtgattctaaat

SEQ ID NO: 657 - DNA, 24 bp, Artificial Sequence
  Description of Artificial Sequence: Synthetic oligonucleotide
caggtgagaagaggaggaggcagc

SEQ ID NO: 658 - DNA, 20 bp, Artificial Sequence
  Description of Artificial Sequence: Synthetic oligonucleotide
caggggcaggtgggcattaa

SEQ ID NO: 659 - DNA, 25 bp, Artificial Sequence
  Description of Artificial Sequence: Synthetic oligonucleotide
aataccctacctggttgttgtgagt

SEQ ID NO: 660 - DNA, 28 bp, Artificial Sequence
  Description of Artificial Sequence: Synthetic oligonucleotide
ccctcgttctctaatcaattatctttgt

SEQ ID NO: 661 - DNA, 22 bp, Artificial Sequence
  Description of Artificial Sequence: Synthetic oligonucleotide
aacaaaggcaaaaacgcggacg

SEQ ID NO: 662 - DNA, 26 bp, Artificial Sequence
  Description of Artificial Sequence: Synthetic oligonucleotide
gttaaagcagcagcctagattcagaa

SEQ ID NO: 663 - DNA, 20 bp, Artificial Sequence
  Description of Artificial Sequence: Synthetic oligonucleotide
gccaggggctctcctctcct

SEQ ID NO: 664 - DNA, 20 bp, Artificial Sequence
  Description of Artificial Sequence: Synthetic oligonucleotide
cctgctctgctggggtccaa

SEQ ID NO: 665 - DNA, 22 bp, Artificial Sequence
  Description of Artificial Sequence: Synthetic oligonucleotide
caccaggggaagctttcacaaa

SEQ ID NO: 666 - DNA, 22 bp, Artificial Sequence
  Description of Artificial Sequence: Synthetic oligonucleotide
ggtggaattgtttggggacaat

SEQ ID NO: 667 - DNA, 28 bp, Artificial Sequence
  Description of Artificial Sequence: Synthetic oligonucleotide
ttcttttgatggtcttaagaaggagaat

SEQ ID NO: 668 - DNA, 23 bp, Artificial Sequence
  Description of Artificial Sequence: Synthetic oligonucleotide
gctcagactttgacttccccgag

SEQ ID NO: 669 - DNA, 29 bp, Artificial Sequence
  Description of Artificial Sequence: Synthetic oligonucleotide
ggcaaatgaactaaatctttcctgatagt

SEQ ID NO: 670 - DNA, 19 bp, Artificial Sequence
  Description of Artificial Sequence: Synthetic oligonucleotide
cctgctgcaggcggacaca

SEQ ID NO: 671 - DNA, 23 bp, Artificial Sequence
  Description of Artificial Sequence: Synthetic oligonucleotide
agagatctggggatttcggctct

SEQ ID NO: 672 - DNA, 19 bp, Artificial Sequence
  Description of Artificial Sequence: Synthetic oligonucleotide
gccaggcttgtccacccct

SEQ ID NO: 673 - DNA, 24 bp, Artificial Sequence
  Description of Artificial Sequence: Synthetic oligonucleotide
cttcaaggaagactgggaaatggt

SEQ ID NO: 674 - DNA, 24 bp, Artificial Sequence
  Description of Artificial Sequence: Synthetic oligonucleotide
acagagacaccctcaaaggacgaa

SEQ ID NO: 675 - DNA, 22 bp, Artificial Sequence
  Description of Artificial Sequence: Synthetic oligonucleotide
ccctgaaggcacaggtaaccct

SEQ ID NO: 676 - DNA, 26 bp, Artificial Sequence
  Description of Artificial Sequence: Synthetic oligonucleotide
agacttgggaggtgatgtcatataaa

SEQ ID NO: 677 - DNA, 24 bp, Artificial Sequence
  Description of Artificial Sequence: Synthetic oligonucleotide
tgagggtgtcaggagatgaggaaa

SEQ ID NO: 678 - DNA, 18 bp, Artificial Sequence
  Description of Artificial Sequence: Synthetic oligonucleotide
ccctcatggaccccggat

SEQ ID NO: 679 - DNA, 27 bp, Artificial Sequence
  Description of Artificial Sequence: Synthetic oligonucleotide
cacctccttcaaagcatctgattctat

SEQ ID NO: 680 - DNA, 25 bp, Artificial Sequence
  Description of Artificial Sequence: Synthetic oligonucleotide
cctcccacttaagagtgaggacacg

SEQ ID NO: 681 - DNA, 23 bp, Artificial Sequence
  Description of Artificial Sequence: Synthetic oligonucleotide
ctgtctgtcaccacccccatttt

SEQ ID NO: 682 - DNA, 23 bp, Artificial Sequence
  Description of Artificial Sequence: Synthetic oligonucleotide
ctgtctgtcaccacccccatttt

SEQ ID NO: 683 - DNA, 20 bp, Artificial Sequence
  Description of Artificial Sequence: Synthetic oligonucleotide
gaccagccccttgtcaggga

SEQ ID NO: 684 - DNA, 28 bp, Artificial Sequence
  Description of Artificial Sequence: Synthetic oligonucleotide
ttgagttgcttactatgttctaggcact

SEQ ID NO: 685 - DNA, 24 bp, Artificial Sequence
  Description of Artificial Sequence: Synthetic oligonucleotide
caagtgttggtgcctctttgtgca

SEQ ID NO: 686 - DNA, 24 bp, Artificial Sequence
  Description of Artificial Sequence: Synthetic oligonucleotide
gaaaggaagcagggatgaagtggt

SEQ ID NO: 687 - DNA, 21 bp, Artificial Sequence
  Description of Artificial Sequence: Synthetic oligonucleotide
gccttggactgagccaggcta

SEQ ID NO: 688 - DNA, 29 bp, Artificial Sequence
  Description of Artificial Sequence: Synthetic oligonucleotide
gcatgaatccttaatattgaagagaccaa

SEQ ID NO: 689 - DNA, 23 bp, Artificial Sequence
  Description of Artificial Sequence: Synthetic oligonucleotide
ttgggaacgcacagtttttcact

SEQ ID NO: 690 - DNA, 23 bp, Artificial Sequence
  Description of Artificial Sequence: Synthetic oligonucleotide
tgttgcacagggaccaggtatga

SEQ ID NO: 691 - DNA, 23 bp, Artificial Sequence
  Description of Artificial Sequence: Synthetic oligonucleotide
cgcttgttagcacccactgaata

SEQ ID NO: 692 - DNA, 23 bp, Artificial Sequence
  Description of Artificial Sequence: Synthetic oligonucleotide
ggagtgaaagagcctccaggact

SEQ ID NO: 693 - DNA, 24 bp, Artificial Sequence
  Description of Artificial Sequence: Synthetic oligonucleotide
ctagggtgatgtaggggatgcact

SEQ ID NO: 694 - DNA, 22 bp, Artificial Sequence
  Description of Artificial Sequence: Synthetic oligonucleotide
gggtggcttactccaggcaact

SEQ ID NO: 695 - DNA, 22 bp, Artificial Sequence
  Description of Artificial Sequence: Synthetic oligonucleotide
caaggtccggcagctcttcata

SEQ ID NO: 696 - DNA, 24 bp, Artificial Sequence
  Description of Artificial Sequence: Synthetic oligonucleotide
ggtaagtgctggccttccttccta

SEQ ID NO: 697 - DNA, 19 bp, Artificial Sequence
  Description of Artificial Sequence: Synthetic oligonucleotide
agtgagggggaccctgggt

SEQ ID NO: 698 - DNA, 27 bp, Artificial Sequence
  Description of Artificial Sequence: Synthetic oligonucleotide
tctacaatggcattcaataaagtgcaa

SEQ ID NO: 699 - DNA, 24 bp, Artificial Sequence
  Description of Artificial Sequence: Synthetic oligonucleotide
gacagacaacgcgtggtttttctc

SEQ ID NO: 700 - DNA, 22 bp, Artificial Sequence
  Description of Artificial Sequence: Synthetic oligonucleotide
aggccatgaccctgaaagcaga

SEQ ID NO: 701 - DNA, 18 bp, Artificial Sequence
  Description of Artificial Sequence: Synthetic oligonucleotide
ggcccttgtggcagcagt

SEQ ID NO: 702 - DNA, 24 bp, Artificial Sequence
  Description of Artificial Sequence: Synthetic oligonucleotide
ggagagctaggtccatctccctct

SEQ ID NO: 703 - DNA, 29 bp, Artificial Sequence
  Description of Artificial Sequence: Synthetic oligonucleotide
ccagaactctactgaaatcaagtctggat

SEQ ID NO: 704 - DNA, 23 bp, Artificial Sequence
  Description of Artificial Sequence: Synthetic oligonucleotide
caagagaagaatgacagcaagca

SEQ ID NO: 705 - DNA, 20 bp, Artificial Sequence
  Description of Artificial Sequence: Synthetic oligonucleotide
cgatgctgaggatgggcaca

SEQ ID NO: 706 - DNA, 27 bp, Artificial Sequence
  Description of Artificial Sequence: Synthetic oligonucleotide
cccatatgaattgatcagagaagaatt

SEQ ID NO: 707 - DNA, 27 bp, Artificial Sequence
  Description of Artificial Sequence: Synthetic oligonucleotide
ctgtcttctcctactatccagcttcct

SEQ ID NO: 708 - DNA, 25 bp, Artificial Sequence
  Description of Artificial Sequence: Synthetic oligonucleotide
acctgttacactgcctcccacttat

SEQ ID NO: 709 - DNA, 25 bp, Artificial Sequence
  Description of Artificial Sequence: Synthetic oligonucleotide
ccatctagttatcctttcctcccca

SEQ ID NO: 710 - DNA, 23 bp, Artificial Sequence
  Description of Artificial Sequence: Synthetic oligonucleotide
tctctgagcagggtagcagggag

SEQ ID NO: 711 - DNA, 23 bp, Artificial Sequence
  Description of Artificial Sequence: Synthetic oligonucleotide
aaaaaccgatgccccacttagga

SEQ ID NO: 712 - DNA, 29 bp, Artificial Sequence
  Description of Artificial Sequence: Synthetic oligonucleotide
ggatacaggggaaaaaagatagaaatgta

SEQ ID NO: 713 - DNA, 23 bp, Artificial Sequence
  Description of Artificial Sequence: Synthetic oligonucleotide
tctctagacccccctgcatgtta

SEQ ID NO: 714 - DNA, 24 bp, Artificial Sequence
  Description of Artificial Sequence: Synthetic oligonucleotide
tctctcccttccctgattccagta

SEQ ID NO: 715 - DNA, 19 bp, Artificial Sequence
  Description of Artificial Sequence: Synthetic oligonucleotide
gctgggcgtgctggcatat

SEQ ID NO: 716 - DNA, 23 bp, Artificial Sequence
  Description of Artificial Sequence: Synthetic oligonucleotide
tacaacctcacggtgctgtccca

SEQ ID NO: 717 - DNA, 24 bp, Artificial Sequence
  Description of Artificial Sequence: Synthetic oligonucleotide
tcacccaaactcacttcccaaact

SEQ ID NO: 718 - DNA, 21 bp, Artificial Sequence
  Description of Artificial Sequence: Synthetic oligonucleotide
caaccccttcctcagtcccct

SEQ ID NO: 719 - DNA, 24 bp, Artificial Sequence
  Description of Artificial Sequence: Synthetic oligonucleotide
cagggtctctcctcaggagagaat

SEQ ID NO: 720 - DNA, 30 bp, Artificial Sequence
  Description of Artificial Sequence: Synthetic oligonucleotide
cgcagtctgatttttactgtctcacatagt

SEQ ID NO: 721 - DNA, 20 bp, Artificial Sequence
  Description of Artificial Sequence: Synthetic oligonucleotide
tcccaccagcacccaatcct

SEQ ID NO: 722 - DNA, 26 bp, Artificial Sequence
  Description of Artificial Sequence: Synthetic oligonucleotide
aaagtcacattcaaatgcacaaatgt

SEQ ID NO: 723 - DNA, 30 bp, Artificial Sequence
  Description of Artificial Sequence: Synthetic oligonucleotide
cgcaaagaaatagcactcagacataaattt

SEQ ID NO: 724 - DNA, 27 bp, Artificial Sequence
  Description of Artificial Sequence: Synthetic oligonucleotide
aatgtgaaaaaatgtttcatttccaga

SEQ ID NO: 725 - DNA, 27 bp, Artificial Sequence
  Description of Artificial Sequence: Synthetic oligonucleotide
catgctcattgctgatacatagaaaaa

SEQ ID NO: 726 - DNA, 28 bp, Artificial Sequence
  Description of Artificial Sequence: Synthetic oligonucleotide
aaaaaaagtgatgagacatgacttggta

SEQ ID NO: 727 - DNA, 20 bp, Artificial Sequence
  Description of Artificial Sequence: Synthetic oligonucleotide
actgggcagcagcccaggga

SEQ ID NO: 728 - DNA, 27 bp, Artificial Sequence
  Description of Artificial Sequence: Synthetic oligonucleotide
tttccatgttaatcaatcaagtccata

SEQ ID NO: 729 - DNA, 26 bp, Artificial Sequence
  Description of Artificial Sequence: Synthetic oligonucleotide
tgcaaagctaggagttcatgaagtgg

SEQ ID NO: 730 - DNA, 22 bp, Artificial Sequence
  Description of Artificial Sequence: Synthetic oligonucleotide
atagtcctctgcccctgtccct

SEQ ID NO: 731 - DNA, 23 bp, Artificial Sequence
  Description of Artificial Sequence: Synthetic oligonucleotide
ttgtcttcctcctctgtgggagg

SEQ ID NO: 732 - DNA, 27 bp, Artificial Sequence
  Description of Artificial Sequence: Synthetic oligonucleotide
acacttgaaatatggcaagtacgacta

SEQ ID NO: 733 - DNA, 21 bp, Artificial Sequence
  Description of Artificial Sequence: Synthetic oligonucleotide
gcagcccccaggtatcaggat

SEQ ID NO: 734 - DNA, 28 bp, Artificial Sequence
  Description of Artificial Sequence: Synthetic oligonucleotide
gagaagctgcagtgagttttatgttcta

SEQ ID NO: 735 - DNA, 24 bp, Artificial Sequence
  Description of Artificial Sequence: Synthetic oligonucleotide
ttcagctttgacaatattggggga

SEQ ID NO: 736 - DNA, 24 bp, Artificial Sequence
  Description of Artificial Sequence: Synthetic oligonucleotide
ttgccaaggtcaccaaatctttaa

SEQ ID NO: 737 - DNA, 23 bp, Artificial Sequence
  Description of Artificial Sequence: Synthetic oligonucleotide
aggccgagaagtgaacacagctc

SEQ ID NO: 738 - DNA, 22 bp, Artificial Sequence
  Description of Artificial Sequence: Synthetic oligonucleotide
actctgaaatcgcggtgcagta

SEQ ID NO: 739 - DNA, 21 bp, Artificial Sequence
  Description of Artificial Sequence: Synthetic oligonucleotide
agcggcatctcagatcccaca

SEQ ID NO: 740 - DNA, 26 bp, Artificial Sequence
  Description of Artificial Sequence: Synthetic oligonucleotide
tttgacttgggaacactttctcaagg

SEQ ID NO: 741 - DNA, 24 bp, Artificial Sequence
  Description of Artificial Sequence: Synthetic oligonucleotide
aagatcaggaacccacaggaagct

SEQ ID NO: 742 - DNA, 25 bp, Artificial Sequence
  Description of Artificial Sequence: Synthetic oligonucleotide
cattctgcagaaacctgtcaccatt

SEQ ID NO: 743 - DNA, 22 bp, Artificial Sequence
  Description of Artificial Sequence: Synthetic oligonucleotide
gatcacatgcttcagagggcaa

SEQ ID NO: 744 - DNA, 21 bp, Artificial Sequence
  Description of Artificial Sequence: Synthetic oligonucleotide
ccccatccacctcaaagtgca

SEQ ID NO: 745 - DNA, 28 bp, Artificial Sequence
  Description of Artificial Sequence: Synthetic oligonucleotide
gggcctgactcttagaaaacactctata

SEQ ID NO: 746 - DNA, 29 bp, Artificial Sequence
  Description of Artificial Sequence: Synthetic oligonucleotide
tgatcaagggactagaacactaaactgga

SEQ ID NO: 747 - DNA, 22 bp, Artificial Sequence
  Description of Artificial Sequence: Synthetic oligonucleotide
ggcacatcttgatctggaaagt

SEQ ID NO: 748 - DNA, 21 bp, Artificial Sequence
  Description of Artificial Sequence: Synthetic oligonucleotide
cttggctccagcgagaggcca

SEQ ID NO: 749 - DNA, 21 bp, Artificial Sequence
  Description of Artificial Sequence: Synthetic oligonucleotide
gtgtgtgtgagtggctggggg

SEQ ID NO: 750 - DNA, 24 bp, Artificial Sequence
  Description of Artificial Sequence: Synthetic oligonucleotide
ctgatggatggtaaggcagtgctt

SEQ ID NO: 751 - DNA, 19 bp, Artificial Sequence
  Description of Artificial Sequence: Synthetic oligonucleotide
gtccgatggtgccttggca

SEQ ID NO: 752 - DNA, 29 bp, Artificial Sequence
  Description of Artificial Sequence: Synthetic oligonucleotide
gccactaggagaattaaaaccataagcta

SEQ ID NO: 753 - DNA, 26 bp, Artificial Sequence
  Description of Artificial Sequence: Synthetic oligonucleotide
tcaaaatgctgcatagaatgtcagat

SEQ ID NO: 754 - DNA, 23 bp, Artificial Sequence
  Description of Artificial Sequence: Synthetic oligonucleotide
gcaataggttttgaggggcatga

SEQ ID NO: 755 - DNA, 23 bp, Artificial Sequence
  Description of Artificial Sequence: Synthetic oligonucleotide
ttcccctccttttgctcaagaat

SEQ ID NO: 756 - DNA, 21 bp, Artificial Sequence
  Description of Artificial Sequence: Synthetic oligonucleotide
caagtgcccccattctgacat

SEQ ID NO: 757 - DNA, 27 bp, Artificial Sequence
  Description of Artificial Sequence: Synthetic oligonucleotide
agtgcaggggggtaaaaataaataact

SEQ ID NO: 758 - DNA, 18 bp, Artificial Sequence
  Description of Artificial Sequence: Synthetic oligonucleotide
gccccagccctggcttga

SEQ ID NO: 759 - DNA, 24 bp, Artificial Sequence
  Description of Artificial Sequence: Synthetic oligonucleotide
gttttgccaggtgagtgtgacaat

SEQ ID NO: 760 - DNA, 23 bp, Artificial Sequence
  Description of Artificial Sequence: Synthetic oligonucleotide
cttgtgtgcttgctgggatcata

SEQ ID NO: 761 - DNA, 23 bp, Artificial Sequence
  Description of Artificial Sequence: Synthetic oligonucleotide
gacctgagaagatgccctggtta

SEQ ID NO: 762 - DNA, 26 bp, Artificial Sequence
  Description of Artificial Sequence: Synthetic oligonucleotide
aatgtgcatcatgagaaaagaaatgt

SEQ ID NO: 763 - DNA, 23 bp, Artificial Sequence
  Description of Artificial Sequence: Synthetic oligonucleotide
aaccaggtgttgatctgggcttt

SEQ ID NO: 764 - DNA, 23 bp, Artificial Sequence
  Description of Artificial Sequence: Synthetic oligonucleotide
tgcgctgcacttaacatttgcta

SEQ ID NO: 765 - DNA, 24 bp, Artificial Sequence
  Description of Artificial Sequence: Synthetic oligonucleotide
catggtctcaggcacctggattat

SEQ ID NO: 766 - DNA, 24 bp, Artificial Sequence
  Description of Artificial Sequence: Synthetic oligonucleotide
tataggggaggagtggaggaggga

SEQ ID NO: 767 - DNA, 22 bp, Artificial Sequence
  Description of Artificial Sequence: Synthetic oligonucleotide
cagagaagtcttaggcccggca

SEQ ID NO: 768 - DNA, 20 bp, Artificial Sequence
  Description of Artificial Sequence: Synthetic oligonucleotide
ccagcaggccttcaccagaa

SEQ ID NO: 769 - DNA, 23 bp, Artificial Sequence
  Description of Artificial Sequence: Synthetic oligonucleotide
agtgatgtctgaggtggccacaa

SEQ ID NO: 770 - DNA, 22 bp, Artificial Sequence
  Description of Artificial Sequence: Synthetic oligonucleotide
ctaccgctgccaccaatggtat

SEQ ID NO: 771 - DNA, 20 bp, Artificial Sequence
  Description of Artificial Sequence: Synthetic oligonucleotide
ctggtgctgggggtgacagt

SEQ ID NO: 772 - DNA, 30 bp, Artificial Sequence
  Description of Artificial Sequence: Synthetic oligonucleotide
gcaagaggatcacctaggagagtaaattac

SEQ ID NO: 773 - DNA, 23 bp, Artificial Sequence
  Description of Artificial Sequence: Synthetic oligonucleotide
cagacaccaggaggaaaggggtt

SEQ ID NO: 774 - DNA, 20 bp, Artificial Sequence
  Description of Artificial Sequence: Synthetic oligonucleotide
gccactgctggataccccaa

SEQ ID NO: 775 - DNA, 24 bp, Artificial Sequence
  Description of Artificial Sequence: Synthetic oligonucleotide
ggctcttcagattccttcatggct

SEQ ID NO: 776 - DNA, 23 bp, Artificial Sequence
  Description of Artificial Sequence: Synthetic oligonucleotide
tgatgtcaggttccagggtcagt

SEQ ID NO: 777 - DNA, 22 bp, Artificial Sequence
  Description of Artificial Sequence: Synthetic oligonucleotide
gatacgcgtggggtccttacaa

SEQ ID NO: 778 - DNA, 23 bp, Artificial Sequence
  Description of Artificial Sequence: Synthetic oligonucleotide
ggtaagttgggcctggggttttc

SEQ ID NO: 779 - DNA, 24 bp, Artificial Sequence
  Description of Artificial Sequence: Synthetic oligonucleotide
ccttcaaccccattaggccataaa

SEQ ID NO: 780 - DNA, 22 bp, Artificial Sequence
  Description of Artificial Sequence: Synthetic oligonucleotide
gaatggaacggtggctctgaaa

SEQ ID NO: 781 - DNA, 21 bp, Artificial Sequence
  Description of Artificial Sequence: Synthetic oligonucleotide
ctcctggcctcatgacccagg

SEQ ID NO: 782 - DNA, 25 bp, Artificial Sequence
  Description of Artificial Sequence: Synthetic oligonucleotide
gcatttaccccttagtactggggca

SEQ ID NO: 783 - DNA, 27 bp, Artificial Sequence
  Description of Artificial Sequence: Synthetic oligonucleotide
cattttgtgtagtgctggattggtagt

SEQ ID NO: 784 - DNA, 22 bp, Artificial Sequence
  Description of Artificial Sequence: Synthetic oligonucleotide
gtgttgggcggaacagtggaca

SEQ ID NO: 785 - DNA, 22 bp, Artificial Sequence
  Description of Artificial Sequence: Synthetic oligonucleotide
ccagcaactgtcgacgtcacat

SEQ ID NO: 786 - DNA, 24 bp, Artificial Sequence
  Description of Artificial Sequence: Synthetic oligonucleotide
gcaaggagggtatggggaatgttt

SEQ ID NO: 787 - DNA, 24 bp, Artificial Sequence
  Description of Artificial Sequence: Synthetic oligonucleotide
gaaatgggacatggaggaacacat

SEQ ID NO: 788 - DNA, 24 bp, Artificial Sequence
  Description of Artificial Sequence: Synthetic oligonucleotide
gagaatgtaagaggggcaagggtc

SEQ ID NO: 789 - DNA, 24 bp, Artificial Sequence
  Description of Artificial Sequence: Synthetic oligonucleotide
ctgcgactgcacacgaggtttaca

SEQ ID NO: 790 - DNA, 22 bp, Artificial Sequence
  Description of Artificial Sequence: Synthetic oligonucleotide
ctcaacttgctcaccctgccat

SEQ ID NO: 791 - DNA, 22 bp, Artificial Sequence
  Description of Artificial Sequence: Synthetic oligonucleotide
ggcactgggggaaacttaggca

SEQ ID NO: 792 - DNA, 22 bp, Artificial Sequence
  Description of Artificial Sequence: Synthetic oligonucleotide
cagcctcggactccatctctca

SEQ ID NO: 793 - DNA, 23 bp, Artificial Sequence
  Description of Artificial Sequence: Synthetic oligonucleotide
cttggtcccttctgacgtcacca

SEQ ID NO: 794 - DNA, 23 bp, Artificial Sequence
  Description of Artificial Sequence: Synthetic oligonucleotide
gctttgcgggttctgtgtcttat

SEQ ID NO: 795 - DNA, 25 bp, Artificial Sequence
  Description of Artificial Sequence: Synthetic oligonucleotide
cctaccaggctgacacactgatctt

SEQ ID NO: 796 - DNA, 25 bp, Artificial Sequence
  Description of Artificial Sequence: Synthetic oligonucleotide
caaggggaacaaatgcatactcagt

SEQ ID NO: 797 - DNA, 22 bp, Artificial Sequence
  Description of Artificial Sequence: Synthetic oligonucleotide
gtgtgaggggtccttgtgctgt

SEQ ID NO: 798 - DNA, 25 bp, Artificial Sequence
  Description of Artificial Sequence: Synthetic oligonucleotide
gccagtttggatctgaaggtggtaa

SEQ ID NO: 799 - DNA, 23 bp, Artificial Sequence
  Description of Artificial Sequence: Synthetic oligonucleotide
gcaaacctcctgagtgggattct

SEQ ID NO: 800 - DNA, 22 bp, Artificial Sequence
  Description of Artificial Sequence: Synthetic oligonucleotide
gaggcaccaggagatgttccat

SEQ ID NO: 801 - DNA, 21 bp, Artificial Sequence
  Description of Artificial Sequence: Synthetic oligonucleotide
cccctcccagtcactcctgaa

SEQ ID NO: 802 - DNA, 21 bp, Artificial Sequence
  Description of Artificial Sequence: Synthetic oligonucleotide
gtgctcctgctcctgtgggta

SEQ ID NO: 803 - DNA, 19 bp, Artificial Sequence
  Description of Artificial Sequence: Synthetic oligonucleotide
ggcagagccccggagagta

SEQ ID NO: 804 - DNA, 24 bp, Artificial Sequence
  Description of Artificial Sequence: Synthetic oligonucleotide
tttctgcttagctggcaggactca

SEQ ID NO: 805 - DNA, 26 bp, Artificial Sequence
  Description of Artificial Sequence: Synthetic oligonucleotide
aaaagatggcagtattagcaatctct

SEQ ID NO: 806 - DNA, 20 bp, Artificial Sequence
  Description of Artificial Sequence: Synthetic oligonucleotide
cccagcttccatcccctgtt

SEQ ID NO: 807 - DNA, 28 bp, Artificial Sequence
  Description of Artificial Sequence: Synthetic oligonucleotide
cagagatttttaaggccagagattgtat

SEQ ID NO: 808 - DNA, 23 bp, Artificial Sequence
  Description of Artificial Sequence: Synthetic oligonucleotide
gctctgccccaggtttctgaaca

SEQ ID NO: 809 - DNA, 22 bp, Artificial Sequence
  Description of Artificial Sequence: Synthetic oligonucleotide
ccgagctcatcagcagtgacat

SEQ ID NO: 810 - DNA, 21 bp, Artificial Sequence
  Description of Artificial Sequence: Synthetic oligonucleotide
ggagtccccatgagcctgtct

SEQ ID NO: 811 - DNA, 21 bp, Artificial Sequence
  Description of Artificial Sequence: Synthetic oligonucleotide
ccgccacagtgctaggattgt

SEQ ID NO: 812 - DNA, 23 bp, Artificial Sequence
  Description of Artificial Sequence: Synthetic oligonucleotide
aaaaaaagcaaaagccagtgact

SEQ ID NO: 813 - DNA, 29 bp, Artificial Sequence
  Description of Artificial Sequence: Synthetic oligonucleotide
ttctgtcttctcaagcttgatctttactt

SEQ ID NO: 814 - DNA, 23 bp, Artificial Sequence
  Description of Artificial Sequence: Synthetic oligonucleotide
tgatcattccagcccctctgaat

SEQ ID NO: 815 - DNA, 24 bp, Artificial Sequence
  Description of Artificial Sequence: Synthetic oligonucleotide
tggagactacaggcaggaaaccat

SEQ ID NO: 816 - DNA, 27 bp, Artificial Sequence
  Description of Artificial Sequence: Synthetic oligonucleotide
tttgctttttgattcaaaaatttcact

SEQ ID NO: 817 - DNA, 24 bp, Artificial Sequence
  Description of Artificial Sequence: Synthetic oligonucleotide
gggagctcttcctctcccaaaacg

SEQ ID NO: 818 - DNA, 26 bp, Artificial Sequence
  Description of Artificial Sequence: Synthetic oligonucleotide
ggtctctctgcctactcttccttgcg

SEQ ID NO: 819 - DNA, 20 bp, Artificial Sequence
  Description of Artificial Sequence: Synthetic oligonucleotide
gtggtccatgaccatggcat

SEQ ID NO: 820 - DNA, 22 bp, Artificial Sequence
  Description of Artificial Sequence: Synthetic oligonucleotide
gtgcaccatcctgatgcctgtt

SEQ ID NO: 821 - DNA, 22 bp, Artificial Sequence
  Description of Artificial Sequence: Synthetic oligonucleotide
aggcactttccaggttcccact

SEQ ID NO: 822 - DNA, 21 bp, Artificial Sequence
  Description of Artificial Sequence: Synthetic oligonucleotide
cctgacttggggatgcctcaa

SEQ ID NO: 823 - DNA, 21 bp, Artificial Sequence
  Description of Artificial Sequence: Synthetic oligonucleotide
acttgcaggtcaggggtccca

SEQ ID NO: 824 - DNA, 22 bp, Artificial Sequence
  Description of Artificial Sequence: Synthetic oligonucleotide
cagtgcaggtttgtggtcgctc

SEQ ID NO: 825 - DNA, 21 bp, Artificial Sequence
  Description of Artificial Sequence: Synthetic oligonucleotide
gagaaacccgagaggccgatt

SEQ ID NO: 826 - DNA, 21 bp, Artificial Sequence
  Description of Artificial Sequence: Synthetic oligonucleotide
gtttccatgctgggcctgcca

SEQ ID NO: 827 - DNA, 22 bp, Artificial Sequence
  Description of Artificial Sequence: Synthetic oligonucleotide
aaagccagccagaaccaagcat

SEQ ID NO: 828 - DNA, 22 bp, Artificial Sequence
  Description of Artificial Sequence: Synthetic oligonucleotide
ctttgtggccatcagcttcctc

SEQ ID NO: 829 - DNA, 20 bp, Artificial Sequence
  Description of Artificial Sequence: Synthetic oligonucleotide
aggagttgaggccggggaga

SEQ ID NO: 830 - DNA, 22 bp, Artificial Sequence
  Description of Artificial Sequence: Synthetic oligonucleotide
gggagcacagagcccagacact

SEQ ID NO: 831 - DNA, 22 bp, Artificial Sequence
  Description of Artificial Sequence: Synthetic oligonucleotide
aggagagcctcacctgctgtgt

SEQ ID NO: 832 - DNA, 28 bp, Artificial Sequence
  Description of Artificial Sequence: Synthetic oligonucleotide
cataaatatcatactgcccttttcgata

SEQ ID NO: 833 - DNA, 24 bp, Artificial Sequence
  Description of Artificial Sequence: Synthetic oligonucleotide
ggaagccctggtgtgggaaattat

SEQ ID NO: 834 - DNA, 21 bp, Artificial Sequence
  Description of Artificial Sequence: Synthetic oligonucleotide
ggaccacgcttcatccccttt

SEQ ID NO: 835 - DNA, 28 bp, Artificial Sequence
  Description of Artificial Sequence: Synthetic oligonucleotide
cacagctaaagccaataaaaataaacaa

SEQ ID NO: 836 - DNA, 30 bp, Artificial Sequence
  Description of Artificial Sequence: Synthetic oligonucleotide
tggagaagacagctattttccataaaagta

SEQ ID NO: 837 - DNA, 22 bp, Artificial Sequence
  Description of Artificial Sequence: Synthetic oligonucleotide
cagctccaagggtgtgacagga

SEQ ID NO: 838 - DNA, 25 bp, Artificial Sequence
  Description of Artificial Sequence: Synthetic oligonucleotide
ttaagaatatgacttggcgactggg

SEQ ID NO: 839 - DNA, 27 bp, Artificial Sequence
  Description of Artificial Sequence: Synthetic oligonucleotide
ccagtaagaatgactcagagtctccct

SEQ ID NO: 840 - DNA, 20 bp, Artificial Sequence
  Description of Artificial Sequence: Synthetic oligonucleotide
agagagccaagggccccaca

SEQ ID NO: 841 - DNA, 30 bp, Artificial Sequence
  Description of Artificial Sequence: Synthetic oligonucleotide
tgcttctcacaactgcttaaattaggtatc

SEQ ID NO: 842 - DNA, 21 bp, Artificial Sequence
  Description of Artificial Sequence: Synthetic oligonucleotide
aactgggactgcagctgggat

SEQ ID NO: 843 - DNA, 27 bp, Artificial Sequence
  Description of Artificial Sequence: Synthetic oligonucleotide
aaaactgccttataacaccattcaaga

SEQ ID NO: 844 - DNA, 23 bp, Artificial Sequence
  Description of Artificial Sequence: Synthetic oligonucleotide
accagagggagggcgatattcta

SEQ ID NO: 845 - DNA, 22 bp, Artificial Sequence
  Description of Artificial Sequence: Synthetic oligonucleotide
gtacacatgccatgtgcagcat

SEQ ID NO: 846 - DNA, 29 bp, Artificial Sequence
  Description of Artificial Sequence: Synthetic oligonucleotide
ccaaatatactgaaataatgatgtgctgt

SEQ ID NO: 847 - DNA, 21 bp, Artificial Sequence
  Description of Artificial Sequence: Synthetic oligonucleotide
ctcaggccctcctctcccctt

SEQ ID NO: 848 - DNA, 20 bp, Artificial Sequence
  Description of Artificial Sequence: Synthetic oligonucleotide
caactgcaggggtgactgga

SEQ ID NO: 849 - DNA, 22 bp, Artificial Sequence
  Description of Artificial Sequence: Synthetic oligonucleotide
ggaaggatcagcgggagctctt

SEQ ID NO: 850 - DNA, 22 bp, Artificial Sequence
  Description of Artificial Sequence: Synthetic oligonucleotide
ggaggtgtagggtggtgccaca

SEQ ID NO: 851 - DNA, 20 bp, Artificial Sequence
  Description of Artificial Sequence: Synthetic oligonucleotide
aggaatggcctgtgggggaa

SEQ ID NO: 852 - DNA, 20 bp, Artificial Sequence
  Description of Artificial Sequence: Synthetic oligonucleotide
gagagggtgcgcaggaagaa

SEQ ID NO: 853 - DNA, 22 bp, Artificial Sequence
  Description of Artificial Sequence: Synthetic oligonucleotide
acgccttagcgcttccagctct

SEQ ID NO: 854 - DNA, 24 bp, Artificial Sequence
  Description of Artificial Sequence: Synthetic oligonucleotide
agaatttacgcctggactcctcat

SEQ ID NO: 855 - DNA, 21 bp, Artificial Sequence
  Description of Artificial Sequence: Synthetic oligonucleotide
cagctctcctagaggggggca

SEQ ID NO: 856 - DNA, 24 bp, Artificial Sequence
  Description of Artificial Sequence: Synthetic oligonucleotide
tgacctttttcctgggcaactcta

SEQ ID NO: 857 - DNA, 21 bp, Artificial Sequence
  Description of Artificial Sequence: Synthetic oligonucleotide
ggacacaggggccttgaaagt

SEQ ID NO: 858 - DNA, 22 bp, Artificial Sequence
  Description of Artificial Sequence: Synthetic oligonucleotide
ctgacctttggccctgaagggt

SEQ ID NO: 859 - DNA, 24 bp, Artificial Sequence
  Description of Artificial Sequence: Synthetic oligonucleotide
ccctagtcactgccaagaggagct

SEQ ID NO: 860 - DNA, 19 bp, Artificial Sequence
  Description of Artificial Sequence: Synthetic oligonucleotide
ccctccccgcacaggaaaa

SEQ ID NO: 861 - DNA, 21 bp, Artificial Sequence
  Description of Artificial Sequence: Synthetic oligonucleotide
ggcactcagctgatgcccttt

SEQ ID NO: 862 - DNA, 18 bp, Artificial Sequence
  Description of Artificial Sequence: Synthetic oligonucleotide
cgcgcccagccgtctgtt

SEQ ID NO: 863 - DNA, 21 bp, Artificial Sequence
  Description of Artificial Sequence: Synthetic oligonucleotide
caccccgggctatttgacagt

SEQ ID NO: 864 - DNA, 28 bp, Artificial Sequence
  Description of Artificial Sequence: Synthetic oligonucleotide
tctattagctccagaaatacttccacaa

SEQ ID NO: 865 - DNA, 20 bp, Artificial Sequence
  Description of Artificial Sequence: Synthetic oligonucleotide
cctgggtgacaggaggagaa

SEQ ID NO: 866 - DNA, 19 bp, Artificial Sequence
  Description of Artificial Sequence: Synthetic oligonucleotide
aggcccaccaggcatgcct

SEQ ID NO: 867 - DNA, 20 bp, Artificial Sequence
  Description of Artificial Sequence: Synthetic oligonucleotide
gacagtcctggccctggcta

SEQ ID NO: 868 - DNA, 22 bp, Artificial Sequence
  Description of Artificial Sequence: Synthetic oligonucleotide
cagccatagggaagaggggaaa

SEQ ID NO: 869 - DNA, 22 bp, Artificial Sequence
  Description of Artificial Sequence: Synthetic oligonucleotide
ccctctctgccttgggacctta

SEQ ID NO: 870 - DNA, 20 bp, Artificial Sequence
  Description of Artificial Sequence: Synthetic oligonucleotide
cccagcaaacacacgggtta

SEQ ID NO: 871 - DNA, 23 bp, Artificial Sequence
  Description of Artificial Sequence: Synthetic oligonucleotide
aatattgcccagtcgcacagcta

SEQ ID NO: 872 - DNA, 23 bp, Artificial Sequence
  Description of Artificial Sequence: Synthetic oligonucleotide
gcccagaaacctcaggaaggaaa

SEQ ID NO: 873 - DNA, 23 bp, Artificial Sequence
  Description of Artificial Sequence: Synthetic oligonucleotide
ttctccttcagcctcctcccttt

SEQ ID NO: 874 - DNA, 21 bp, Artificial Sequence
  Description of Artificial Sequence: Synthetic oligonucleotide
ctgggaattctgggcaggcat

SEQ ID NO: 875 - DNA, 26 bp, Artificial Sequence
  Description of Artificial Sequence: Synthetic oligonucleotide
cgtttcctgccgctataacagaataa

SEQ ID NO: 876 - DNA, 21 bp, Artificial Sequence
  Description of Artificial Sequence: Synthetic oligonucleotide
ctggcacgttgaggtcccctt

SEQ ID NO: 877 - DNA, 21 bp, Artificial Sequence
  Description of Artificial Sequence: Synthetic oligonucleotide
gctcctcctcaccagcccact

SEQ ID NO: 878 - DNA, 21 bp, Artificial Sequence
  Description of Artificial Sequence: Synthetic oligonucleotide
cacgggaggaaagggggaata

SEQ ID NO: 879 - DNA, 26 bp, Artificial Sequence
  Description of Artificial Sequence: Synthetic oligonucleotide
gaaatggggctaatcatttgctttaa

SEQ ID NO: 880 - DNA, 21 bp, Artificial Sequence
  Description of Artificial Sequence: Synthetic oligonucleotide
gagcaatctcagcccccaaca

SEQ ID NO: 881 - DNA, 22 bp, Artificial Sequence
  Description of Artificial Sequence: Synthetic oligonucleotide
gtcccaccccagctttcaggta

SEQ ID NO: 882 - DNA, 20 bp, Artificial Sequence
  Description of Artificial Sequence: Synthetic oligonucleotide
gggccccttccacaatcctg

SEQ ID NO: 883 - DNA, 20 bp, Artificial Sequence
  Description of Artificial Sequence: Synthetic oligonucleotide
ctgcagatcaggggccagat

SEQ ID NO: 884 - DNA, 23 bp, Artificial Sequence
  Description of Artificial Sequence: Synthetic oligonucleotide
ctgttccgaagcatgttcctcct

SEQ ID NO: 885 - DNA, 20 bp, Artificial Sequence
  Description of Artificial Sequence: Synthetic oligonucleotide
gggagaggagggcctgaggg

SEQ ID NO: 886 - DNA, 30 bp, Artificial Sequence
  Description of Artificial Sequence: Synthetic oligonucleotide
caagcatgtttgtacataaagattctccta

SEQ ID NO: 887 - DNA, 21 bp, Artificial Sequence
  Description of Artificial Sequence: Synthetic oligonucleotide
agggggcaaggcgtctgtttt

SEQ ID NO: 888 - DNA, 22 bp, Artificial Sequence
  Description of Artificial Sequence: Synthetic oligonucleotide
cacctcttgaccagctgccttc

SEQ ID NO: 889 - DNA, 21 bp, Artificial Sequence
  Description of Artificial Sequence: Synthetic oligonucleotide
ggaccaggagctggtgcttct

SEQ ID NO: 890 - DNA, 21 bp, Artificial Sequence
  Description of Artificial Sequence: Synthetic oligonucleotide
agccggctggatctcttggaa

SEQ ID NO: 891 - DNA, 28 bp, Artificial Sequence
  Description of Artificial Sequence: Synthetic oligonucleotide
gccacatatggaattacaaatttttcta

SEQ ID NO: 892 - DNA, 20 bp, Artificial Sequence
  Description of Artificial Sequence: Synthetic oligonucleotide
gcctggtgctgggcctagtc

SEQ ID NO: 893 - DNA, 19 bp, Artificial Sequence
  Description of Artificial Sequence: Synthetic oligonucleotide
gctgagtgccggctcacca

SEQ ID NO: 894 - DNA, 26 bp, Artificial Sequence
  Description of Artificial Sequence: Synthetic oligonucleotide
aatttctgtgattggctgaagacaga

SEQ ID NO: 895 - DNA, 22 bp, Artificial Sequence
  Description of Artificial Sequence: Synthetic oligonucleotide
cctcacctggcagacgaaagga

SEQ ID NO: 896 - DNA, 29 bp, Artificial Sequence
  Description of Artificial Sequence: Synthetic oligonucleotide
cccaagtggctaatcagtcctaattataa

SEQ ID NO: 897 - DNA, 22 bp, Artificial Sequence
  Description of Artificial Sequence: Synthetic oligonucleotide
ctgtcaaggcatcagggaaggt

SEQ ID NO: 898 - DNA, 24 bp, Artificial Sequence
  Description of Artificial Sequence: Synthetic oligonucleotide
aagatgaaggtctggaccacgact

SEQ ID NO: 899 - DNA, 30 bp, Artificial Sequence
  Description of Artificial Sequence: Synthetic oligonucleotide
gaaacacaactgtaaacaagacagatttct

SEQ ID NO: 900 - DNA, 20 bp, Artificial Sequence
  Description of Artificial Sequence: Synthetic oligonucleotide
ctggtgggcaccatgcatta

SEQ ID NO: 901 - DNA, 22 bp, Artificial Sequence
  Description of Artificial Sequence: Synthetic oligonucleotide
ctgggctttaagggaccctcat

SEQ ID NO: 902 - DNA, 29 bp, Artificial Sequence
  Description of Artificial Sequence: Synthetic oligonucleotide
cctagcatttccctatgagctaactatgg

SEQ ID NO: 903 - DNA, 21 bp, Artificial Sequence
  Description of Artificial Sequence: Synthetic oligonucleotide
actgtcccctgccctctcaca

SEQ ID NO: 904 - DNA, 23 bp, Artificial Sequence
  Description of Artificial Sequence: Synthetic oligonucleotide
tttgtggtgaaggaggggagaga

SEQ ID NO: 905 - DNA, 25 bp, Artificial Sequence
  Description of Artificial Sequence: Synthetic oligonucleotide
gggcataagttggatgacctatgaa

SEQ ID NO: 906 - DNA, 19 bp, Artificial Sequence
  Description of Artificial Sequence: Synthetic oligonucleotide
agctggctcccagcctcgt

SEQ ID NO: 907 - DNA, 20 bp, Artificial Sequence
  Description of Artificial Sequence: Synthetic oligonucleotide
ctgcccctccctcagggagt

SEQ ID NO: 908 - DNA, 22 bp, Artificial Sequence
  Description of Artificial Sequence: Synthetic oligonucleotide
gacccctgttcccatgctgact

SEQ ID NO: 909 - DNA, 22 bp, Artificial Sequence
  Description of Artificial Sequence: Synthetic oligonucleotide
ccacctcctcaaactcacggca

SEQ ID NO: 910 - DNA, 28 bp, Artificial Sequence
  Description of Artificial Sequence: Synthetic oligonucleotide
tcctaacctatattattgcaccagtgta

SEQ ID NO: 911 - DNA, 22 bp, Artificial Sequence
  Description of Artificial Sequence: Synthetic oligonucleotide
gtgattggattgtggctgccca

SEQ ID NO: 912 - DNA, 20 bp, Artificial Sequence
  Description of Artificial Sequence: Synthetic oligonucleotide
ggtcccctcacctcacccat

SEQ ID NO: 913 - DNA, 25 bp, Artificial Sequence
  Description of Artificial Sequence: Synthetic oligonucleotide
aaataagtcagccactgcacctgga

SEQ ID NO: 914 - DNA, 27 bp, Artificial Sequence
  Description of Artificial Sequence: Synthetic oligonucleotide
gagcaaagagtcaacaaaaccttctgt

SEQ ID NO: 915 - DNA, 21 bp, Artificial Sequence
  Description of Artificial Sequence: Synthetic oligonucleotide
cggcctgttggcagaagagta

SEQ ID NO: 916 - DNA, 24 bp, Artificial Sequence
  Description of Artificial Sequence: Synthetic oligonucleotide
aatcccgtttccaggctaaattgt

SEQ ID NO: 917 - DNA, 30 bp, Artificial Sequence
  Description of Artificial Sequence: Synthetic oligonucleotide
ggcggaatagtattccatcatgtatatata

SEQ ID NO: 918 - DNA, 19 bp, Artificial Sequence
  Description of Artificial Sequence: Synthetic oligonucleotide
ctatgcctccccctgccat

SEQ ID NO: 919 - DNA, 21 bp, Artificial Sequence
  Description of Artificial Sequence: Synthetic oligonucleotide
atgccactgccctccagacca

SEQ ID NO: 920 - DNA, 22 bp, Artificial Sequence
  Description of Artificial Sequence: Synthetic oligonucleotide
agatgcatcttgcccacagcaa

SEQ ID NO: 921 - DNA, 27 bp, Artificial Sequence
  Description of Artificial Sequence: Synthetic oligonucleotide
ttttcattgcctcaaaatttgatttta

SEQ ID NO: 922 - DNA, 21 bp, Artificial Sequence
  Description of Artificial Sequence: Synthetic oligonucleotide
gctcccatccccagctcatta

SEQ ID NO: 923 - DNA, 22 bp, Artificial Sequence
  Description of Artificial Sequence: Synthetic oligonucleotide
cagaaaggccaaggttcccaca

SEQ ID NO: 924 - DNA, 27 bp, Artificial Sequence
  Description of Artificial Sequence: Synthetic oligonucleotide
ccctgctggtaaatgattcttcattat

SEQ ID NO: 925 - DNA, 23 bp, Artificial Sequence
  Description of Artificial Sequence: Synthetic oligonucleotide
cactgttccctcctcagggacta

SEQ ID NO: 926 - DNA, 20 bp, Artificial Sequence
  Description of Artificial Sequence: Synthetic oligonucleotide
acaggccccttctgcggaga

SEQ ID NO: 927 - DNA, 20 bp, Artificial Sequence
  Description of Artificial Sequence: Synthetic oligonucleotide
aggtggggtggagggggaga

SEQ ID NO: 928 - DNA, 24 bp, Artificial Sequence
  Description of Artificial Sequence: Synthetic oligonucleotide
atcaaagcagtcatgtgtgcaatt

SEQ ID NO: 929 - DNA, 20 bp, Artificial Sequence
  Description of Artificial Sequence: Synthetic oligonucleotide
gggacgcagttctcggacga

SEQ ID NO: 930 - DNA, 22 bp, Artificial Sequence
  Description of Artificial Sequence: Synthetic oligonucleotide
ggctcctgctttccctgagaac

SEQ ID NO: 931 - DNA, 19 bp, Artificial Sequence
  Description of Artificial Sequence: Synthetic oligonucleotide
ctcagcctctgaccgccca

SEQ ID NO: 932 - DNA, 22 bp, Artificial Sequence
  Description of Artificial Sequence: Synthetic oligonucleotide
gaggaaggaggcagtgagtggt

SEQ ID NO: 933 - DNA, 22 bp, Artificial Sequence
  Description of Artificial Sequence: Synthetic oligonucleotide
catcactcttgcctgctgccaa

SEQ ID NO: 934 - DNA, 22 bp, Artificial Sequence
  Description of Artificial Sequence: Synthetic oligonucleotide
catcactcttgcctgctgccaa

SEQ ID NO: 935 - DNA, 21 bp, Artificial Sequence
  Description of Artificial Sequence: Synthetic oligonucleotide
cctccaggctggatgcagaca

SEQ ID NO: 936 - DNA, 24 bp, Artificial Sequence
  Description of Artificial Sequence: Synthetic oligonucleotide
gcttgcttacgatggcaaggatta

SEQ ID NO: 937 - DNA, 21 bp, Artificial Sequence
  Description of Artificial Sequence: Synthetic oligonucleotide
gctgaaaaggggcgtcgtgtt

SEQ ID NO: 938 - DNA, 28 bp, Artificial Sequence
  Description of Artificial Sequence: Synthetic oligonucleotide
cattctggagaaaggaaaaaaatgagat

SEQ ID NO: 939 - DNA, 19 bp, Artificial Sequence
  Description of Artificial Sequence: Synthetic oligonucleotide
ccctttcccatgaccccca

SEQ ID NO: 940 - DNA, 20 bp, Artificial Sequence
  Description of Artificial Sequence: Synthetic oligonucleotide
ccccacaggcggtgtatgga

SEQ ID NO: 941 - DNA, 22 bp, Artificial Sequence
  Description of Artificial Sequence: Synthetic oligonucleotide
tcctccagaaggtccaaagcca

SEQ ID NO: 942 - DNA, 20 bp, Artificial Sequence
  Description of Artificial Sequence: Synthetic oligonucleotide
atggcgcaagcagagacgct

SEQ ID NO: 943 - DNA, 27 bp, Artificial Sequence
  Description of Artificial Sequence: Synthetic oligonucleotide
accctttttggtcttattttcacttag

SEQ ID NO: 944 - DNA, 28 bp, Artificial Sequence
  Description of Artificial Sequence: Synthetic oligonucleotide
cccacctatagtactgctgctactcaat

SEQ ID NO: 945 - DNA, 29 bp, Artificial Sequence
  Description of Artificial Sequence: Synthetic oligonucleotide
caaaccaaaacaagtcaaattaccataaa

SEQ ID NO: 946 - DNA, 29 bp, Artificial Sequence
  Description of Artificial Sequence: Synthetic oligonucleotide
tttcttggatataacaccaaagatacaaa

SEQ ID NO: 947 - DNA, 22 bp, Artificial Sequence
  Description of Artificial Sequence: Synthetic oligonucleotide
agcaggcaagagtgatgggaga

SEQ ID NO: 948 - DNA, 22 bp, Artificial Sequence
  Description of Artificial Sequence: Synthetic oligonucleotide
agcaggcaagagtgatgggaga

SEQ ID NO: 949 - DNA, 21 bp, Artificial Sequence
  Description of Artificial Sequence: Synthetic oligonucleotide
agggagcccctaggggagaac

SEQ ID NO: 950 - DNA, 21 bp, Artificial Sequence
  Description of Artificial Sequence: Synthetic oligonucleotide
aggagtgggagcagggtcata

SEQ ID NO: 951 - DNA, 23 bp, Artificial Sequence
  Description of Artificial Sequence: Synthetic oligonucleotide
ctgctgtggatatccccagcacg

SEQ ID NO: 952 - DNA, 22 bp, Artificial Sequence
  Description of Artificial Sequence: Synthetic oligonucleotide
tggactctttgccccttccaga

SEQ ID NO: 953 - DNA, 19 bp, Artificial Sequence
  Description of Artificial Sequence: Synthetic oligonucleotide
aggggcccctagagggcct

SEQ ID NO: 954 - DNA, 29 bp, Artificial Sequence
  Description of Artificial Sequence: Synthetic oligonucleotide
tctctatggaagtcctaagactgaaatca

SEQ ID NO: 955 - DNA, 30 bp, Artificial Sequence
  Description of Artificial Sequence: Synthetic oligonucleotide
gggacacaaaaccagttaaagatagaaaga

SEQ ID NO: 956 - DNA, 22 bp, Artificial Sequence
  Description of Artificial Sequence: Synthetic oligonucleotide
ggaagcgaaaggggagctgagt

SEQ ID NO: 957 - DNA, 27 bp, Artificial Sequence
  Description of Artificial Sequence: Synthetic oligonucleotide
cggaatacagctcctaggtttttgtgt

SEQ ID NO: 958 - DNA, 23 bp, Artificial Sequence
  Description of Artificial Sequence: Synthetic oligonucleotide
gtccaggcccccttctagtttcc

SEQ ID NO: 959 - DNA, 22 bp, Artificial Sequence
  Description of Artificial Sequence: Synthetic oligonucleotide
tgtgtttgctgtgccagccttt

SEQ ID NO: 960 - DNA, 29 bp, Artificial Sequence
  Description of Artificial Sequence: Synthetic oligonucleotide
ttgtgttttctattcatattgctattcca

SEQ ID NO: 961 - DNA, 20 bp, Artificial Sequence
  Description of Artificial Sequence: Synthetic oligonucleotide
ggacggagggaagaccctga

SEQ ID NO: 962 - DNA, 22 bp, Artificial Sequence
  Description of Artificial Sequence: Synthetic oligonucleotide
ggactcacctctgcagccacaa

SEQ ID NO: 963 - DNA, 29 bp, Artificial Sequence
  Description of Artificial Sequence: Synthetic oligonucleotide
tgttgctgctagttattatgaggtagttt

SEQ ID NO: 964 - DNA, 21 bp, Artificial Sequence
  Description of Artificial Sequence: Synthetic oligonucleotide
ctgctggggtcagtggctcta

SEQ ID NO: 965 - DNA, 30 bp, Artificial Sequence
  Description of Artificial Sequence: Synthetic oligonucleotide
cctctaacactctccaagtaaaatcacatc

SEQ ID NO: 966 - DNA, 27 bp, Artificial Sequence
  Description of Artificial Sequence: Synthetic oligonucleotide
gtttcctgaaagtgtaactgctgatct

SEQ ID NO: 967 - DNA, 22 bp, Artificial Sequence
  Description of Artificial Sequence: Synthetic oligonucleotide
acagaggctcacacatcgccca

SEQ ID NO: 968 - DNA, 19 bp, Artificial Sequence
  Description of Artificial Sequence: Synthetic oligonucleotide
agggggctgtctggcaggt

SEQ ID NO: 969 - DNA, 22 bp, Artificial Sequence
  Description of Artificial Sequence: Synthetic oligonucleotide
tgctgctctctgggcctcttta

SEQ ID NO: 970 - DNA, 19 bp, Artificial Sequence
  Description of Artificial Sequence: Synthetic oligonucleotide
gagacacggagcccagcct

SEQ ID NO: 971 - DNA, 18 bp, Artificial Sequence
  Description of Artificial Sequence: Synthetic oligonucleotide
gggcaccaagggccccct

SEQ ID NO: 972 - DNA, 27 bp, Artificial Sequence
  Description of Artificial Sequence: Synthetic oligonucleotide
ttgtgtgactgccttaaaactaatggg

SEQ ID NO: 973 - DNA, 21 bp, Artificial Sequence
  Description of Artificial Sequence: Synthetic oligonucleotide
ctagccgggctggagttgaga

SEQ ID NO: 974 - DNA, 21 bp, Artificial Sequence
  Description of Artificial Sequence: Synthetic oligonucleotide
ctgcccctggaaaaggtccca

SEQ ID NO: 975 - DNA, 19 bp, Artificial Sequence
  Description of Artificial Sequence: Synthetic oligonucleotide
ggagctttcagtgcgggga

SEQ ID NO: 976 - DNA, 18 bp, Artificial Sequence
  Description of Artificial Sequence: Synthetic oligonucleotide
gcttgagccacctcgcct

SEQ ID NO: 977 - DNA, 21 bp, Artificial Sequence
  Description of Artificial Sequence: Synthetic oligonucleotide
gttggcgacatgatgcatgca

SEQ ID NO: 978 - DNA, 20 bp, Artificial Sequence
  Description of Artificial Sequence: Synthetic oligonucleotide
agctcagcccagcccctcaa

SEQ ID NO: 979 - DNA, 29 bp, Artificial Sequence
  Description of Artificial Sequence: Synthetic oligonucleotide
catagatgtccaatgataggagactgata

SEQ ID NO: 980 - DNA, 21 bp, Artificial Sequence
  Description of Artificial Sequence: Synthetic oligonucleotide
gcgatccacgtgcaaaactct

SEQ ID NO: 981 - DNA, 18 bp, Artificial Sequence
  Description of Artificial Sequence: Synthetic oligonucleotide
cccccgtgcccggctttt

SEQ ID NO: 982 - DNA, 23 bp, Artificial Sequence
  Description of Artificial Sequence: Synthetic oligonucleotide
ccagtatccacctctgggggagt

SEQ ID NO: 983 - DNA, 28 bp, Artificial Sequence
  Description of Artificial Sequence: Synthetic oligonucleotide
ccacactgtcaatgaaaagagtcaaact

SEQ ID NO: 984 - DNA, 23 bp, Artificial Sequence
  Description of Artificial Sequence: Synthetic oligonucleotide
cagggcagatgttccctcacaga

SEQ ID NO: 985 - DNA, 28 bp, Artificial Sequence
  Description of Artificial Sequence: Synthetic oligonucleotide
cagccataatcacgagagatgtaagaat

SEQ ID NO: 986 - DNA, 18 bp, Artificial Sequence
  Description of Artificial Sequence: Synthetic oligonucleotide
atcgagccccagggggaa

SEQ ID NO: 987 - DNA, 20 bp, Artificial Sequence
  Description of Artificial Sequence: Synthetic oligonucleotide
atctccacctgggggggcga

SEQ ID NO: 988 - DNA, 22 bp, Artificial Sequence
  Description of Artificial Sequence: Synthetic oligonucleotide
gtgcccagtgtgtaacaggcca

SEQ ID NO: 989 - DNA, 21 bp, Artificial Sequence
  Description of Artificial Sequence: Synthetic oligonucleotide
accacgccttctgctccacca

SEQ ID NO: 990 - DNA, 28 bp, Artificial Sequence
  Description of Artificial Sequence: Synthetic oligonucleotide
tgaatagctctgtaaggcactaaaacat

SEQ ID NO: 991 - DNA, 30 bp, Artificial Sequence
  Description of Artificial Sequence: Synthetic oligonucleotide
ggactaaaaaggaaagaagctaacaatggt

SEQ ID NO: 992 - DNA, 28 bp, Artificial Sequence
  Description of Artificial Sequence: Synthetic oligonucleotide
ggctgcatgattttaaattaaatgatta

SEQ ID NO: 993 - DNA, 22 bp, Artificial Sequence
  Description of Artificial Sequence: Synthetic oligonucleotide
agaggctctgagaggtggccta

SEQ ID NO: 994 - DNA, 18 bp, Artificial Sequence
  Description of Artificial Sequence: Synthetic oligonucleotide
cacccctttcctggccaa

SEQ ID NO: 995 - DNA, 24 bp, Artificial Sequence
  Description of Artificial Sequence: Synthetic oligonucleotide
aaagtcctgctgctccataaagat

SEQ ID NO: 996 - DNA, 20 bp, Artificial Sequence
  Description of Artificial Sequence: Synthetic oligonucleotide
gggctgaccgggtcatgagt

SEQ ID NO: 997 - DNA, 25 bp, Artificial Sequence
  Description of Artificial Sequence: Synthetic oligonucleotide
gcctttcgaattaacccagtcagaa

SEQ ID NO: 998 - DNA, 29 bp, Artificial Sequence
  Description of Artificial Sequence: Synthetic oligonucleotide
cctttacgataggtcttgaagttaggtat

SEQ ID NO: 999 - DNA, 20 bp, Artificial Sequence
  Description of Artificial Sequence: Synthetic oligonucleotide
agctgggagcccctgagggt

SEQ ID NO: 1000 - DNA, 25 bp, Artificial Sequence
  Description of Artificial Sequence: Synthetic oligonucleotide
gggctatgggatgggatagatagat

SEQ ID NO: 1001 - DNA, 29 bp, Artificial Sequence
  Description of Artificial Sequence: Synthetic oligonucleotide
acacaggtatcttctacaaattgtaagct

SEQ ID NO: 1002 - DNA, 23 bp, Artificial Sequence
  Description of Artificial Sequence: Synthetic oligonucleotide
cggtggctcaaacctataaccct

SEQ ID NO: 1003 - DNA, 19 bp, Artificial Sequence
  Description of Artificial Sequence: Synthetic oligonucleotide
atccgcggggagacaggca

SEQ ID NO: 1004 - DNA, 21 bp, Artificial Sequence
  Description of Artificial Sequence: Synthetic oligonucleotide
ccaaggcctgcgttcagttga

SEQ ID NO: 1005 - DNA, 22 bp, Artificial Sequence
  Description of Artificial Sequence: Synthetic oligonucleotide
atggtcttgagctccaggggag

SEQ ID NO: 1006 - DNA, 28 bp, Artificial Sequence
  Description of Artificial Sequence: Synthetic oligonucleotide
ggcctcacaacctttttttttaagttca

SEQ ID NO: 1007 - DNA, 29 bp, Artificial Sequence
  Description of Artificial Sequence: Synthetic oligonucleotide
tcaatctactacctctttcgcataatcaa

SEQ ID NO: 1008 - DNA, 19 bp, Artificial Sequence
  Description of Artificial Sequence: Synthetic oligonucleotide
gagggtgaccaccctgggg

SEQ ID NO: 1009 - DNA, 20 bp, Artificial Sequence
  Description of Artificial Sequence: Synthetic oligonucleotide
ctgtgccctctggtgagcca

SEQ ID NO: 1010 - DNA, 20 bp, Artificial Sequence
  Description of Artificial Sequence: Synthetic oligonucleotide
aaagggagcctggggctgtc

SEQ ID NO: 1011 - DNA, 22 bp, Artificial Sequence
  Description of Artificial Sequence: Synthetic oligonucleotide
gagaattgcaaggtggctgccg

SEQ ID NO: 1012 - DNA, 20 bp, Artificial Sequence
  Description of Artificial Sequence: Synthetic oligonucleotide
ggaacgtgggaaggaaccca

SEQ ID NO: 1013 - DNA, 22 bp, Artificial Sequence
  Description of Artificial Sequence: Synthetic oligonucleotide
tgggcaacagagacagactcca

SEQ ID NO: 1014 - DNA, 27 bp, Artificial Sequence
  Description of Artificial Sequence: Synthetic oligonucleotide
ctggttagaaggttggtttgaaaaata

SEQ ID NO: 1015 - DNA, 29 bp, Artificial Sequence
  Description of Artificial Sequence: Synthetic oligonucleotide
gaatgaactaattcagaaaatcggtacca

SEQ ID NO: 1016 - DNA, 20 bp, Artificial Sequence
  Description of Artificial Sequence: Synthetic oligonucleotide
aagtcccagggcctcaggca

SEQ ID NO: 1017 - DNA, 19 bp, Artificial Sequence
  Description of Artificial Sequence: Synthetic oligonucleotide
acctgcggatcgcgctcct

SEQ ID NO: 1018 - DNA, 18 bp, Artificial Sequence
  Description of Artificial Sequence: Synthetic oligonucleotide
cccgatcaatcccccggt

SEQ ID NO: 1019 - DNA, 28 bp, Artificial Sequence
  Description of Artificial Sequence: Synthetic oligonucleotide
aaagtgaacaggttgaatttaatctcta

SEQ ID NO: 1020 - DNA, 26 bp, Artificial Sequence
  Description of Artificial Sequence: Synthetic oligonucleotide
cccacctttacagtatttcacagggt

SEQ ID NO: 1021 - DNA, 20 bp, Artificial Sequence
  Description of Artificial Sequence: Synthetic oligonucleotide
aggcggagagagagccggtt

SEQ ID NO: 1022 - DNA, 20 bp, Artificial Sequence
  Description of Artificial Sequence: Synthetic oligonucleotide
ggtcaaatgccatcacggcg

SEQ ID NO: 1023 - DNA, 21 bp, Artificial Sequence
  Description of Artificial Sequence: Synthetic oligonucleotide
ggggacaggaattcaggggat

SEQ ID NO: 1024 - DNA, 20 bp, Artificial Sequence
  Description of Artificial Sequence: Synthetic oligonucleotide
ggacctcattggggttgggt

SEQ ID NO: 1025 - DNA, 18 bp, Artificial Sequence
  Description of Artificial Sequence: Synthetic oligonucleotide
ggtccaatgcacgggcat

SEQ ID NO: 1026 - DNA, 21 bp, Artificial Sequence
  Description of Artificial Sequence: Synthetic oligonucleotide
gggtgatgcggatgctctttt

SEQ ID NO: 1027 - DNA, 22 bp, Artificial Sequence
  Description of Artificial Sequence: Synthetic oligonucleotide
gtggcactggatctgggggtat

SEQ ID NO: 1028 - DNA, 22 bp, Artificial Sequence
  Description of Artificial Sequence: Synthetic oligonucleotide
ctaccttccccgatgcccatct

SEQ ID NO: 1029 - DNA, 18 bp, Artificial Sequence
  Description of Artificial Sequence: Synthetic oligonucleotide
cctcagccctgccctgct

SEQ ID NO: 1030 - DNA, 21 bp, Artificial Sequence
  Description of Artificial Sequence: Synthetic oligonucleotide
caaccaccgcacatccactgt

SEQ ID NO: 1031 - DNA, 20 bp, Artificial Sequence
  Description of Artificial Sequence: Synthetic oligonucleotide
ctgtgactggccagggacct

SEQ ID NO: 1032 - DNA, 18 bp, Artificial Sequence
  Description of Artificial Sequence: Synthetic oligonucleotide
accgccagtgccttggga

SEQ ID NO: 1033 - DNA, 19 bp, Artificial Sequence
  Description of Artificial Sequence: Synthetic oligonucleotide
ggaggggtggaggggacca

SEQ ID NO: 1034 - DNA, 23 bp, Artificial Sequence
  Description of Artificial Sequence: Synthetic oligonucleotide
cccacctgtcctgcagtctttgt

SEQ ID NO: 1035 - DNA, 30 bp, Artificial Sequence
  Description of Artificial Sequence: Synthetic oligonucleotide
gagttgtatatatgggaaacttacaaggaa

SEQ ID NO: 1036 - DNA, 26 bp, Artificial Sequence
  Description of Artificial Sequence: Synthetic oligonucleotide
tggtgtaagggaaaggagagaaacta

SEQ ID NO: 1037 - DNA, 28 bp, Artificial Sequence
  Description of Artificial Sequence: Synthetic oligonucleotide
tttttctgtggttctgacctaacatttt

SEQ ID NO: 1038 - DNA, 21 bp, Artificial Sequence
  Description of Artificial Sequence: Synthetic oligonucleotide
cttgtgccaatggggatgcct

SEQ ID NO: 1039 - DNA, 26 bp, Artificial Sequence
  Description of Artificial Sequence: Synthetic oligonucleotide
tggagctgttcttagagatgacatta

SEQ ID NO: 1040 - DNA, 21 bp, Artificial Sequence
  Description of Artificial Sequence: Synthetic oligonucleotide
cggatctggtcggtgatggtt

SEQ ID NO: 1041 - DNA, 20 bp, Artificial Sequence
  Description of Artificial Sequence: Synthetic oligonucleotide
agtccatcagccgctgctga

SEQ ID NO: 1042 - DNA, 22 bp, Artificial Sequence
  Description of Artificial Sequence: Synthetic oligonucleotide
ctgctccctgctgcaaaaaaca

SEQ ID NO: 1043 - DNA, 30 bp, Artificial Sequence
  Description of Artificial Sequence: Synthetic oligonucleotide
tggcatagtagaaaagaaacaagaatgata

SEQ ID NO: 1044 - DNA, 20 bp, Artificial Sequence
  Description of Artificial Sequence: Synthetic oligonucleotide
cattcacacccacccaccat

SEQ ID NO: 1045 - DNA, 27 bp, Artificial Sequence
  Description of Artificial Sequence: Synthetic oligonucleotide
aatgtggttaacacattagtggactct

SEQ ID NO: 1046 - DNA, 20 bp, Artificial Sequence
  Description of Artificial Sequence: Synthetic oligonucleotide
gctcaccaccaagtcgccat

SEQ ID NO: 1047 - DNA, 20 bp, Artificial Sequence
  Description of Artificial Sequence: Synthetic oligonucleotide
gcttctgcccactgtcccca

SEQ ID NO: 1048 - DNA, 20 bp, Artificial Sequence
  Description of Artificial Sequence: Synthetic oligonucleotide
ggggagcatcatggcacaca

SEQ ID NO: 1049 - DNA, 21 bp, Artificial Sequence
  Description of Artificial Sequence: Synthetic oligonucleotide
atctgggccagcccaacacct

SEQ ID NO: 1050 - DNA, 27 bp, Artificial Sequence
  Description of Artificial Sequence: Synthetic oligonucleotide
tgaatgggctcatataagtttccttaa

SEQ ID NO: 1051 - DNA, 29 bp, Artificial Sequence
  Description of Artificial Sequence: Synthetic oligonucleotide
caatacacaaacctttacagtattcagat

SEQ ID NO: 1052 - DNA, 20 bp, Artificial Sequence
  Description of Artificial Sequence: Synthetic oligonucleotide
ctcatgggggcaggtgcagt

SEQ ID NO: 1053 - DNA, 19 bp, Artificial Sequence
  Description of Artificial Sequence: Synthetic oligonucleotide
agaaggctgtggggggcca

SEQ ID NO: 1054 - DNA, 30 bp, Artificial Sequence
  Description of Artificial Sequence: Synthetic oligonucleotide
caatggtaccttccatatagcatatagttt

SEQ ID NO: 1055 - DNA, 18 bp, Artificial Sequence
  Description of Artificial Sequence: Synthetic oligonucleotide
gggggaaggtgcaggcca

SEQ ID NO: 1056 - DNA, 22 bp, Artificial Sequence
  Description of Artificial Sequence: Synthetic oligonucleotide
ctgctgcaactcaaggctcaca

SEQ ID NO: 1057 - DNA, 30 bp, Artificial Sequence
  Description of Artificial Sequence: Synthetic oligonucleotide
catgtaaaatttatctttaattcccaatgg

SEQ ID NO: 1058 - DNA, 20 bp, Artificial Sequence
  Description of Artificial Sequence: Synthetic oligonucleotide
tgggcttgagtgggcagctt

SEQ ID NO: 1059 - DNA, 27 bp, Artificial Sequence
  Description of Artificial Sequence: Synthetic oligonucleotide
ctgttaaagcaactgactgctaaagat

SEQ ID NO: 1060 - DNA, 19 bp, Artificial Sequence
  Description of Artificial Sequence: Synthetic oligonucleotide
acccccacccagacccaaa

SEQ ID NO: 1061 - DNA, 28 bp, Artificial Sequence
  Description of Artificial Sequence: Synthetic oligonucleotide
gcatttcagtggtattttccatttttgt

SEQ ID NO: 1062 - DNA, 26 bp, Artificial Sequence
  Description of Artificial Sequence: Synthetic oligonucleotide
aggaaagggagagagaggaaagaaat

SEQ ID NO: 1063 - DNA, 21 bp, Artificial Sequence
  Description of Artificial Sequence: Synthetic oligonucleotide
ctcttcccccaccccactgaa

SEQ ID NO: 1064 - DNA, 21 bp, Artificial Sequence
  Description of Artificial Sequence: Synthetic oligonucleotide
acctgccaagtgaatggccga

SEQ ID NO: 1065 - DNA, 22 bp, Artificial Sequence
  Description of Artificial Sequence: Synthetic oligonucleotide
cacccaaggggaaatggagaca

SEQ ID NO: 1066 - DNA, 18 bp, Artificial Sequence
  Description of Artificial Sequence: Synthetic oligonucleotide
gaagggccaaccccccca

SEQ ID NO: 1067 - DNA, 30 bp, Artificial Sequence
  Description of Artificial Sequence: Synthetic oligonucleotide
caaatcaatggattaaataacctagttgaa

SEQ ID NO: 1068 - DNA, 19 bp, Artificial Sequence
  Description of Artificial Sequence: Synthetic oligonucleotide
agggccccagtgccatctc

SEQ ID NO: 1069 - DNA, 18 bp, Artificial Sequence
  Description of Artificial Sequence: Synthetic oligonucleotide
gttccggatctgggcgcg

SEQ ID NO: 1070 - DNA, 21 bp, Artificial Sequence
  Description of Artificial Sequence: Synthetic oligonucleotide
ccttcatgatgcaggcccaaa

SEQ ID NO: 1071 - DNA, 28 bp, Artificial Sequence
  Description of Artificial Sequence: Synthetic oligonucleotide
tgcaacactctctcactttaccttgttt

SEQ ID NO: 1072 - DNA, 23 bp, Artificial Sequence
  Description of Artificial Sequence: Synthetic oligonucleotide
gtgagaccccattcctacaaaat

SEQ ID NO: 1073 - DNA, 18 bp, Artificial Sequence
  Description of Artificial Sequence: Synthetic oligonucleotide
cgctgcaaggtcgtgcgt

SEQ ID NO: 1074 - DNA, 28 bp, Artificial Sequence
  Description of Artificial Sequence: Synthetic oligonucleotide
tttcatcacacaggtactaagcattcta

SEQ ID NO: 1075 - DNA, 19 bp, Artificial Sequence
  Description of Artificial Sequence: Synthetic oligonucleotide
ggagccagggctcagccat

SEQ ID NO: 1076 - DNA, 24 bp, Artificial Sequence
  Description of Artificial Sequence: Synthetic oligonucleotide
ggaattcccggatgaaaagtgaaa

SEQ ID NO: 1077 - DNA, 21 bp, Artificial Sequence
  Description of Artificial Sequence: Synthetic oligonucleotide
gtctacaccagccatgtggaa

SEQ ID NO: 1078 - DNA, 20 bp, Artificial Sequence
  Description of Artificial Sequence: Synthetic oligonucleotide
gcttctgcccactgtcccca

SEQ ID NO: 1079 - DNA, 20 bp, Artificial Sequence
  Description of Artificial Sequence: Synthetic oligonucleotide
gaggcatggcactgccatgt

SEQ ID NO: 1080 - DNA, 28 bp, Artificial Sequence
  Description of Artificial Sequence: Synthetic oligonucleotide
tttagcatctaacaatgttcgacatata

SEQ ID NO: 1081 - DNA, 20 bp, Artificial Sequence
  Description of Artificial Sequence: Synthetic oligonucleotide
ccaactcaccccacctggat

SEQ ID NO: 1082 - DNA, 21 bp, Artificial Sequence
  Description of Artificial Sequence: Synthetic oligonucleotide
aggaggtgcctttggggcaga

SEQ ID NO: 1083 - DNA, 19 bp, Artificial Sequence
  Description of Artificial Sequence: Synthetic oligonucleotide
agaggccccctgtgtccct

SEQ ID NO: 1084 - DNA, 18 bp, Artificial Sequence
  Description of Artificial Sequence: Synthetic oligonucleotide
gcgcctgcgctgtgtgta

SEQ ID NO: 1085 - DNA, 27 bp, Artificial Sequence
  Description of Artificial Sequence: Synthetic oligonucleotide
aagagttctgatgagtgcaatttcaga

SEQ ID NO: 1086 - DNA, 18 bp, Artificial Sequence
  Description of Artificial Sequence: Synthetic oligonucleotide
agggacggggcccaagct

SEQ ID NO: 1087 - DNA, 29 bp, Artificial Sequence
  Description of Artificial Sequence: Synthetic oligonucleotide
tcagctgtcacataataagctaaggaaga

SEQ ID NO: 1088 - DNA, 22 bp, Artificial Sequence
  Description of Artificial Sequence: Synthetic oligonucleotide
gagtgagccatgtggatcccta

SEQ ID NO: 1089 - DNA, 22 bp, Artificial Sequence
  Description of Artificial Sequence: Synthetic oligonucleotide
tttgccactgtttgctgtgggt

SEQ ID NO: 1090 - DNA, 19 bp, Artificial Sequence
  Description of Artificial Sequence: Synthetic oligonucleotide
agggcaggcagggccctgc

SEQ ID NO: 1091 - DNA, 19 bp, Artificial Sequence
  Description of Artificial Sequence: Synthetic oligonucleotide
gcccccttccatccccagt

SEQ ID NO: 1092 - DNA, 25 bp, Artificial Sequence
  Description of Artificial Sequence: Synthetic oligonucleotide
ggtagagggaatgggagagaccagc

SEQ ID NO: 1093 - DNA, 19 bp, Artificial Sequence
  Description of Artificial Sequence: Synthetic oligonucleotide
ggagcgccggtggagtaat

SEQ ID NO: 1094 - DNA, 21 bp, Artificial Sequence
  Description of Artificial Sequence: Synthetic oligonucleotide
agggagggtcagtggggttga

SEQ ID NO: 1095 - DNA, 18 bp, Artificial Sequence
  Description of Artificial Sequence: Synthetic oligonucleotide
aggatccccggcacccag

SEQ ID NO: 1096 - DNA, 20 bp, Artificial Sequence
  Description of Artificial Sequence: Synthetic oligonucleotide
ggaggagctcacccacccca

SEQ ID NO: 1097 - DNA, 22 bp, Artificial Sequence
  Description of Artificial Sequence: Synthetic oligonucleotide
tcgcttacataacccagggcgt

SEQ ID NO: 1098 - DNA, 18 bp, Artificial Sequence
  Description of Artificial Sequence: Synthetic oligonucleotide
aggggcctggggcaacga

SEQ ID NO: 1099 - DNA, 26 bp, Artificial Sequence
  Description of Artificial Sequence: Synthetic oligonucleotide
caacaaacatcatctaccgcagtttt

SEQ ID NO: 1100 - DNA, 21 bp, Artificial Sequence
  Description of Artificial Sequence: Synthetic oligonucleotide
gccctgaccgatacttgggca

SEQ ID NO: 1101 - DNA, 28 bp, Artificial Sequence
  Description of Artificial Sequence: Synthetic oligonucleotide
tgggctttttgtttttttaattcattca

SEQ ID NO: 1102 - DNA, 29 bp, Artificial Sequence
  Description of Artificial Sequence: Synthetic oligonucleotide
tgaaggtggaaaacatttaagaagtacat

SEQ ID NO: 1103 - DNA, 19 bp, Artificial Sequence
  Description of Artificial Sequence: Synthetic oligonucleotide
accctgggctgctgcccaa

SEQ ID NO: 1104 - DNA, 18 bp, Artificial Sequence
  Description of Artificial Sequence: Synthetic oligonucleotide
ccacaggccccctcagga

SEQ ID NO: 1105 - DNA, 26 bp, Artificial Sequence
  Description of Artificial Sequence: Synthetic oligonucleotide
cccagagtcacaaactgttatgtcaa

SEQ ID NO: 1106 - DNA, 19 bp, Artificial Sequence
  Description of Artificial Sequence: Synthetic oligonucleotide
agggcggggccacgttcat

SEQ ID NO: 1107 - DNA, 30 bp, Artificial Sequence
  Description of Artificial Sequence: Synthetic oligonucleotide
tgaaaaatacaaacttcagagtgaaagaaa

SEQ ID NO: 1108 - DNA, 20 bp, Artificial Sequence
  Description of Artificial Sequence: Synthetic oligonucleotide
cacctctccccaccaggtga

SEQ ID NO: 1109 - DNA, 28 bp, Artificial Sequence
  Description of Artificial Sequence: Synthetic oligonucleotide
tctgattagcagcagttataagtagggt

SEQ ID NO: 1110 - DNA, 20 bp, Artificial Sequence
  Description of Artificial Sequence: Synthetic oligonucleotide
gcaggctctgggtcatgata

SEQ ID NO: 1111 - DNA, 30 bp, Artificial Sequence
  Description of Artificial Sequence: Synthetic oligonucleotide
gctgaaaattttttggaatatcagttgata

SEQ ID NO: 1112 - DNA, 25 bp, Artificial Sequence
  Description of Artificial Sequence: Synthetic oligonucleotide
cagaggaaagaattccaaagcagca

SEQ ID NO: 1113 - DNA, 19 bp, Artificial Sequence
  Description of Artificial Sequence: Synthetic oligonucleotide
accccacccgacccccaat

SEQ ID NO: 1114 - DNA, 20 bp, Artificial Sequence
  Description of Artificial Sequence: Synthetic oligonucleotide
ggaaagtccgggtggcctca

SEQ ID NO: 1115 - DNA, 19 bp, Artificial Sequence
  Description of Artificial Sequence: Synthetic oligonucleotide
gacgtggtggcatgcacct

SEQ ID NO: 1116 - DNA, 20 bp, Artificial Sequence
  Description of Artificial Sequence: Synthetic oligonucleotide
gtcagggacagggtcggggt

SEQ ID NO: 1117 - DNA, 22 bp, Artificial Sequence
  Description of Artificial Sequence: Synthetic oligonucleotide
gtgaggagtgggcagcaaggac

SEQ ID NO: 1118 - DNA, 20 bp, Artificial Sequence
  Description of Artificial Sequence: Synthetic oligonucleotide
gcctgcgagagaagcaggct

SEQ ID NO: 1119 - DNA, 20 bp, Artificial Sequence
  Description of Artificial Sequence: Synthetic oligonucleotide
agccccttctccaagcccca

SEQ ID NO: 1120 - DNA, 19 bp, Artificial Sequence
  Description of Artificial Sequence: Synthetic oligonucleotide
caccccaccccacctctct

SEQ ID NO: 1121 - DNA, 30 bp, Artificial Sequence
  Description of Artificial Sequence: Synthetic oligonucleotide
tgttaaatagagtggacaaaacacaatgaa

SEQ ID NO: 1122 - DNA, 27 bp, Artificial Sequence
  Description of Artificial Sequence: Synthetic oligonucleotide
tctgctgtgcaagataatttcatcttc

SEQ ID NO: 1123 - DNA, 18 bp, Artificial Sequence
  Description of Artificial Sequence: Synthetic oligonucleotide
ccccagggctccaggcgt

SEQ ID NO: 1124 - DNA, 19 bp, Artificial Sequence
  Description of Artificial Sequence: Synthetic oligonucleotide
actgcccccctcccatcct

SEQ ID NO: 1125 - DNA, 18 bp, Artificial Sequence
  Description of Artificial Sequence: Synthetic oligonucleotide
gctggggattggcagcca

SEQ ID NO: 1126 - DNA, 18 bp, Artificial Sequence
  Description of Artificial Sequence: Synthetic oligonucleotide
ccgcccacgtggactggt

SEQ ID NO: 1127 - DNA, 29 bp, Artificial Sequence
  Description of Artificial Sequence: Synthetic oligonucleotide
aaaggtacaaaaagtcacaaattgaaact

SEQ ID NO: 1128 - DNA, 20 bp, Artificial Sequence
  Description of Artificial Sequence: Synthetic oligonucleotide
accatgccgtccccagaggt

SEQ ID NO: 1129 - DNA, 29 bp, Artificial Sequence
  Description of Artificial Sequence: Synthetic oligonucleotide
ttcatgcattttacatctagatcttcaca

SEQ ID NO: 1130 - DNA, 20 bp, Artificial Sequence
  Description of Artificial Sequence: Synthetic oligonucleotide
ggcccatcgtctcgcactct

SEQ ID NO: 1131 - DNA, 23 bp, Artificial Sequence
  Description of Artificial Sequence: Synthetic oligonucleotide
ccctaggccccttgtcatcttca

SEQ ID NO: 1132 - DNA, 28 bp, Artificial Sequence
  Description of Artificial Sequence: Synthetic oligonucleotide
ttgctgttctcatgatagtgaattttca

SEQ ID NO: 1133 - DNA, 28 bp, Artificial Sequence
  Description of Artificial Sequence: Synthetic oligonucleotide
tgtatcccttccttctctcctagtacct

SEQ ID NO: 1134 - DNA, 29 bp, Artificial Sequence
  Description of Artificial Sequence: Synthetic oligonucleotide
tcttccttccctattaaaattagaacctt

SEQ ID NO: 1135 - DNA, 24 bp, Artificial Sequence
  Description of Artificial Sequence: Synthetic oligonucleotide
gtcttcaatgatttcacctgggca

SEQ ID NO: 1136 - DNA, 19 bp, Artificial Sequence
  Description of Artificial Sequence: Synthetic oligonucleotide
ctggagcccccagagccta

SEQ ID NO: 1137 - DNA, 21 bp, Artificial Sequence
  Description of Artificial Sequence: Synthetic oligonucleotide
ggaagggaaggctgggctgac

SEQ ID NO: 1138 - DNA, 20 bp, Artificial Sequence
  Description of Artificial Sequence: Synthetic oligonucleotide
acaaggggtgggtgcctgga

SEQ ID NO: 1139 - DNA, 19 bp, Artificial Sequence
  Description of Artificial Sequence: Synthetic oligonucleotide
ggccacaccaacttcccct

SEQ ID NO: 1140 - DNA, 18 bp, Artificial Sequence
  Description of Artificial Sequence: Synthetic oligonucleotide
ggctagggccgtgctggc

SEQ ID NO: 1141 - DNA, 28 bp, Artificial Sequence
  Description of Artificial Sequence: Synthetic oligonucleotide
tccagaaaaaaaattattgaaaagagca

SEQ ID NO: 1142 - DNA, 19 bp, Artificial Sequence
  Description of Artificial Sequence: Synthetic oligonucleotide
atgggccacctgggtgccg

SEQ ID NO: 1143 - DNA, 28 bp, Artificial Sequence
  Description of Artificial Sequence: Synthetic oligonucleotide
tgcaggttataaccagcatttttaaaat

SEQ ID NO: 1144 - DNA, 24 bp, Artificial Sequence
  Description of Artificial Sequence: Synthetic oligonucleotide
cacttgttttccgtcgacgtgatt

SEQ ID NO: 1145 - DNA, 18 bp, Artificial Sequence
  Description of Artificial Sequence: Synthetic oligonucleotide
ccgcctgggagcagctgt

SEQ ID NO: 1146 - DNA, 24 bp, Artificial Sequence
  Description of Artificial Sequence: Synthetic oligonucleotide
gcagcagctcaaaacaaacaacat

SEQ ID NO: 1147 - DNA, 20 bp, Artificial Sequence
  Description of Artificial Sequence: Synthetic oligonucleotide
acctggcggccagaaaaggt

SEQ ID NO: 1148 - DNA, 18 bp, Artificial Sequence
  Description of Artificial Sequence: Synthetic oligonucleotide
ccacgcccggcctcttct

SEQ ID NO: 1149 - DNA, 18 bp, Artificial Sequence
  Description of Artificial Sequence: Synthetic oligonucleotide
gacccatggcctgcccca

SEQ ID NO: 1150 - DNA, 20 bp, Artificial Sequence
  Description of Artificial Sequence: Synthetic oligonucleotide
ggcgtctgcctgagtttggt

SEQ ID NO: 1151 - DNA, 19 bp, Artificial Sequence
  Description of Artificial Sequence: Synthetic oligonucleotide
gccgcaggaagcttcaggt

SEQ ID NO: 1152 - DNA, 30 bp, Artificial Sequence
  Description of Artificial Sequence: Synthetic oligonucleotide
tgaaaagtagatagttgagtaaagctcatt

SEQ ID NO: 1153 - DNA, 25 bp, Artificial Sequence
  Description of Artificial Sequence: Synthetic oligonucleotide
tttagccagggtaacagagtgacga

SEQ ID NO: 1154 - DNA, 30 bp, Artificial Sequence
  Description of Artificial Sequence: Synthetic oligonucleotide
tctgttgtttttctcaaaatttctatagac

SEQ ID NO: 1155 - DNA, 18 bp, Artificial Sequence
  Description of Artificial Sequence: Synthetic oligonucleotide
cgggggtggcggggagaa

SEQ ID NO: 1156 - DNA, 29 bp, Artificial Sequence
  Description of Artificial Sequence: Synthetic oligonucleotide
tgtggtaagcacttaataattatcagcta

SEQ ID NO: 1157 - DNA, 19 bp, Artificial Sequence
  Description of Artificial Sequence: Synthetic oligonucleotide
ctcttggaccgcagcggat

SEQ ID NO: 1158 - DNA, 30 bp, Artificial Sequence
  Description of Artificial Sequence: Synthetic oligonucleotide
aaattgctaagacagattttaaatattcat

SEQ ID NO: 1159 - DNA, 21 bp, Artificial Sequence
  Description of Artificial Sequence: Synthetic oligonucleotide
ctgccgcaggaagatgagcat

SEQ ID NO: 1160 - DNA, 29 bp, Artificial Sequence
  Description of Artificial Sequence: Synthetic oligonucleotide
aaatgcaccactcttagttatgtataggt

SEQ ID NO: 1161 - DNA, 19 bp, Artificial Sequence
  Description of Artificial Sequence: Synthetic oligonucleotide
aggggctcgggagctggac

SEQ ID NO: 1162 - DNA, 22 bp, Artificial Sequence
  Description of Artificial Sequence: Synthetic oligonucleotide
gagggtgacccaaggccctata

SEQ ID NO: 1163 - DNA, 19 bp, Artificial Sequence
  Description of Artificial Sequence: Synthetic oligonucleotide
gcccaggtgtcctggctca

SEQ ID NO: 1164 - DNA, 22 bp, Artificial Sequence
  Description of Artificial Sequence: Synthetic oligonucleotide
ccgggcaatgagataccacaca

SEQ ID NO: 1165 - DNA, 30 bp, Artificial Sequence
  Description of Artificial Sequence: Synthetic oligonucleotide
ttcaagtatttttgtgtccttgtacagtaa

SEQ ID NO: 1166 - DNA, 18 bp, Artificial Sequence
  Description of Artificial Sequence: Synthetic oligonucleotide
gtgggcgcgctgaactgt

SEQ ID NO: 1167 - DNA, 25 bp, Artificial Sequence
  Description of Artificial Sequence: Synthetic oligonucleotide
tttttattgttttttcagtgtggca

SEQ ID NO: 1168 - DNA, 18 bp, Artificial Sequence
  Description of Artificial Sequence: Synthetic oligonucleotide
gggggcggggcctattct

SEQ ID NO: 1169 - DNA, 24 bp, Artificial Sequence
  Description of Artificial Sequence: Synthetic oligonucleotide
cacctcctgggtagctgggactat

SEQ ID NO: 1170 - DNA, 18 bp, Artificial Sequence
  Description of Artificial Sequence: Synthetic oligonucleotide
ccgacgggcgcttcctct

SEQ ID NO: 1171 - DNA, 22 bp, Artificial Sequence
  Description of Artificial Sequence: Synthetic oligonucleotide
gtgagtaactccggcccaggga

SEQ ID NO: 1172 - DNA, 21 bp, Artificial Sequence
  Description of Artificial Sequence: Synthetic oligonucleotide
acaagggcagaggggagctga

SEQ ID NO: 1173 - DNA, 20 bp, Artificial Sequence
  Description of Artificial Sequence: Synthetic oligonucleotide
acacagggtcccaggctgca

SEQ ID NO: 1174 - DNA, 29 bp, Artificial Sequence
  Description of Artificial Sequence: Synthetic oligonucleotide
gagtgaaactctatcttcaaaaaaaatta

SEQ ID NO: 1175 - DNA, 30 bp, Artificial Sequence
  Description of Artificial Sequence: Synthetic oligonucleotide
caaggaatttagaaaatcatgcatatgtta

SEQ ID NO: 1176 - DNA, 30 bp, Artificial Sequence
  Description of Artificial Sequence: Synthetic oligonucleotide
tgttggtattttaataaaaattattggcat

SEQ ID NO: 1177 - DNA, 18 bp, Artificial Sequence
  Description of Artificial Sequence: Synthetic oligonucleotide
agaccgcagctccgggga

SEQ ID NO: 1178 - DNA, 18 bp, Artificial Sequence
  Description of Artificial Sequence: Synthetic oligonucleotide
cgctttgacccgcagggt

SEQ ID NO: 1179 - DNA, 22 bp, Artificial Sequence
  Description of Artificial Sequence: Synthetic oligonucleotide
cgttaccatcttccggatccca

SEQ ID NO: 1180 - DNA, 30 bp, Artificial Sequence
  Description of Artificial Sequence: Synthetic oligonucleotide
ttcagagtattaagagacagagttaagcca

SEQ ID NO: 1181 - DNA, 18 bp, Artificial Sequence
  Description of Artificial Sequence: Synthetic oligonucleotide
gggcccccacccatgcct

SEQ ID NO: 1182 - DNA, 18 bp, Artificial Sequence
  Description of Artificial Sequence: Synthetic oligonucleotide
gcaggcagcggctgtggt

SEQ ID NO: 1183 - DNA, 19 bp, Artificial Sequence
  Description of Artificial Sequence: Synthetic oligonucleotide
ctgtgggcaggcctgacct

SEQ ID NO: 1184 - DNA, 30 bp, Artificial Sequence
  Description of Artificial Sequence: Synthetic oligonucleotide
tgtgcagttcttgaaatttaagtactcact

SEQ ID NO: 1185 - DNA, 30 bp, Artificial Sequence
  Description of Artificial Sequence: Synthetic oligonucleotide
gaatagactaagacaataagcaattttgct

SEQ ID NO: 1186 - DNA, 28 bp, Artificial Sequence
  Description of Artificial Sequence: Synthetic oligonucleotide
ggtatgttttcctttttttccaggattt

SEQ ID NO: 1187 - DNA, 30 bp, Artificial Sequence
  Description of Artificial Sequence: Synthetic oligonucleotide
tcattagcctttgtgtcataaaataaaata

SEQ ID NO: 1188 - DNA, 20 bp, Artificial Sequence
  Description of Artificial Sequence: Synthetic oligonucleotide
actgcagcctggaactccct

SEQ ID NO: 1189 - DNA, 18 bp, Artificial Sequence
  Description of Artificial Sequence: Synthetic oligonucleotide
agggggccggccatggaa

SEQ ID NO: 1190 - DNA, 21 bp, Artificial Sequence
  Description of Artificial Sequence: Synthetic oligonucleotide
aggagggtcccaccctagcca

SEQ ID NO: 1191 - DNA, 21 bp, Artificial Sequence
  Description of Artificial Sequence: Synthetic oligonucleotide
ctcggcctctggggagaatgt

SEQ ID NO: 1192 - DNA, 28 bp, Artificial Sequence
  Description of Artificial Sequence: Synthetic oligonucleotide
aaatttttttgtcagctaaaaatgtagc

SEQ ID NO: 1193 - DNA, 24 bp, Artificial Sequence
  Description of Artificial Sequence: Synthetic oligonucleotide
tatgtgaccctgggcaagcttttt

SEQ ID NO: 1194 - DNA, 18 bp, Artificial Sequence
  Description of Artificial Sequence: Synthetic oligonucleotide
gcgagctggggcccgaca

SEQ ID NO: 1195 - DNA, 18 bp, Artificial Sequence
  Description of Artificial Sequence: Synthetic oligonucleotide
gctttggccatgccggtt

SEQ ID NO: 1196 - DNA, 30 bp, Artificial Sequence
  Description of Artificial Sequence: Synthetic oligonucleotide
caactctatgtttctttgattctaacacaa

SEQ ID NO: 1197 - DNA, 19 bp, Artificial Sequence
  Description of Artificial Sequence: Synthetic oligonucleotide
gccgtggtgatgcacacct

SEQ ID NO: 1198 - DNA, 19 bp, Artificial Sequence
  Description of Artificial Sequence: Synthetic oligonucleotide
gtggccccgccctctccat

SEQ ID NO: 1199 - DNA, 22 bp, Artificial Sequence
  Description of Artificial Sequence: Synthetic oligonucleotide
tgggagcatgcaagaacaaaga

SEQ ID NO: 1200 - DNA, 29 bp, Artificial Sequence
  Description of Artificial Sequence: Synthetic oligonucleotide
ttgtttttgtttctgtaaaagcacttatc

SEQ ID NO: 1201 - DNA, 30 bp, Artificial Sequence
  Description of Artificial Sequence: Synthetic oligonucleotide
aaaccttacaacatatactcctttccatat

SEQ ID NO: 1202 - DNA, 18 bp, Artificial Sequence
  Description of Artificial Sequence: Synthetic oligonucleotide
ctctaccacccctggcct

SEQ ID NO: 1203 - DNA, 18 bp, Artificial Sequence
  Description of Artificial Sequence: Synthetic oligonucleotide
ggggagggggttgctgta

SEQ ID NO: 1204 - DNA, 30 bp, Artificial Sequence
  Description of Artificial Sequence: Synthetic oligonucleotide
tgacagactgtaatgcatgtaatatgatgt

SEQ ID NO: 1205 - DNA, 30 bp, Artificial Sequence
  Description of Artificial Sequence: Synthetic oligonucleotide
agtttctgtcttagtttatgaacatgaaaa

SEQ ID NO: 1206 - DNA, 18 bp, Artificial Sequence
  Description of Artificial Sequence: Synthetic oligonucleotide
cggcgctgcggcaatcct

SEQ ID NO: 1207 - DNA, 19 bp, Artificial Sequence
  Description of Artificial Sequence: Synthetic oligonucleotide
gaggcgcgaacacggagga

SEQ ID NO: 1208 - DNA, 28 bp, Artificial Sequence
  Description of Artificial Sequence: Synthetic oligonucleotide
agctcgaattgagaaactagttttttca

SEQ ID NO: 1209 - DNA, 30 bp, Artificial Sequence
  Description of Artificial Sequence: Synthetic oligonucleotide
tttgtattaaaggacacaaattttagacat

SEQ ID NO: 1210 - DNA, 19 bp, Artificial Sequence
  Description of Artificial Sequence: Synthetic oligonucleotide
cagaaggcgtggtccccat

SEQ ID NO: 1211 - DNA, 30 bp, Artificial Sequence
  Description of Artificial Sequence: Synthetic oligonucleotide
gattatgaattatcagggatttctaagaaa

SEQ ID NO: 1212 - DNA, 30 bp, Artificial Sequence
  Description of Artificial Sequence: Synthetic oligonucleotide
caggcactattctaactactttacaaaaat

SEQ ID NO: 1213 - DNA, 30 bp, Artificial Sequence
  Description of Artificial Sequence: Synthetic oligonucleotide
cattttaaattcacaaaatatttcttcaca

SEQ ID NO: 1214 - DNA, 18 bp, Artificial Sequence
  Description of Artificial Sequence: Synthetic oligonucleotide
ggggaggcgccgcgttga

SEQ ID NO: 1215 - DNA, 19 bp, Artificial Sequence
  Description of Artificial Sequence: Synthetic oligonucleotide
ggcctgttacccccaggca

SEQ ID NO: 1216 - DNA, 20 bp, Artificial Sequence
  Description of Artificial Sequence: Synthetic oligonucleotide
gggctggtggggaaaagagg

SEQ ID NO: 1217 - DNA, 27 bp, Artificial Sequence
  Description of Artificial Sequence: Synthetic oligonucleotide
tgagatatctgctgtacaagggatcat

SEQ ID NO: 1218 - DNA, 30 bp, Artificial Sequence
  Description of Artificial Sequence: Synthetic oligonucleotide
cctgtcttgaatcttatttttttcatttat

SEQ ID NO: 1219 - DNA, 30 bp, Artificial Sequence
  Description of Artificial Sequence: Synthetic oligonucleotide
tggacacttgagaagttatacaattagcct

SEQ ID NO: 1220 - DNA, 18 bp, Artificial Sequence
  Description of Artificial Sequence: Synthetic oligonucleotide
gcgggtctttggggccat

SEQ ID NO: 1221 - DNA, 29 bp, Artificial Sequence
  Description of Artificial Sequence: Synthetic oligonucleotide
aacagaaaatttactattggtggttcaaa

SEQ ID NO: 1222 - DNA, 30 bp, Artificial Sequence
  Description of Artificial Sequence: Synthetic oligonucleotide
tgtgctttctcagataattaaagaaataat

SEQ ID NO: 1223 - DNA, 18 bp, Artificial Sequence
  Description of Artificial Sequence: Synthetic oligonucleotide
ccagctgctgggccacct

SEQ ID NO: 1224 - DNA, 27 bp, Artificial Sequence
  Description of Artificial Sequence: Synthetic oligonucleotide
ttcctttgttgtcttactcattttgga

SEQ ID NO: 1225 - DNA, 28 bp, Artificial Sequence
  Description of Artificial Sequence: Synthetic oligonucleotide
ggtgtcttttgcatattgcaaataatac

SEQ ID NO: 1226 - DNA, 19 bp, Artificial Sequence
  Description of Artificial Sequence: Synthetic oligonucleotide
ctggcccagccactgctga

SEQ ID NO: 1227 - DNA, 30 bp, Artificial Sequence
  Description of Artificial Sequence: Synthetic oligonucleotide
ttgagatactccttactgtacttaaattga

SEQ ID NO: 1228 - DNA, 18 bp, Artificial Sequence
  Description of Artificial Sequence: Synthetic oligonucleotide
gggggctcgggggttgca

SEQ ID NO: 1229 - DNA, 29 bp, Artificial Sequence
  Description of Artificial Sequence: Synthetic oligonucleotide
tttttcattttataatattccatgatgct

SEQ ID NO: 1230 - DNA, 18 bp, Artificial Sequence
  Description of Artificial Sequence: Synthetic oligonucleotide
ccaggctcccccatccag

SEQ ID NO: 1231 - DNA, 18 bp, Artificial Sequence
  Description of Artificial Sequence: Synthetic oligonucleotide
ccatgccccagccacgca

SEQ ID NO: 1232 - DNA, 22 bp, Artificial Sequence
  Description of Artificial Sequence: Synthetic oligonucleotide
gttcccgattggccagctcatt

SEQ ID NO: 1233 - DNA, 28 bp, Artificial Sequence
  Description of Artificial Sequence: Synthetic oligonucleotide
cacaaaatccgcagatatcagaattata

SEQ ID NO: 1234 - DNA, 19 bp, Artificial Sequence
  Description of Artificial Sequence: Synthetic oligonucleotide
acagggcgcctcccggatc

SEQ ID NO: 1235 - DNA, 30 bp, Artificial Sequence
  Description of Artificial Sequence: Synthetic oligonucleotide
tgtataaatagtccattcctttttattgct

SEQ ID NO: 1236 - DNA, 23 bp, Artificial Sequence
  Description of Artificial Sequence: Synthetic oligonucleotide
aaaaacaaacaaggggaggggta

SEQ ID NO: 1237 - DNA, 19 bp, Artificial Sequence
  Description of Artificial Sequence: Synthetic oligonucleotide
caggaggacgcattcggcg

SEQ ID NO: 1238 - DNA, 23 bp, Artificial Sequence
  Description of Artificial Sequence: Synthetic oligonucleotide
agctctgcatgttcctcctccaa

SEQ ID NO: 1239 - DNA, 29 bp, Artificial Sequence
  Description of Artificial Sequence: Synthetic oligonucleotide
ttaaacacaaggatttttctttatttttt

SEQ ID NO: 1240 - DNA, 28 bp, Artificial Sequence
  Description of Artificial Sequence: Synthetic oligonucleotide
gaaggcctttgttacttacttagctcca

SEQ ID NO: 1241 - DNA, 30 bp, Artificial Sequence
  Description of Artificial Sequence: Synthetic oligonucleotide
catgtggattttgtcattctaatttattat

SEQ ID NO: 1242 - DNA, 19 bp, Artificial Sequence
  Description of Artificial Sequence: Synthetic oligonucleotide
gctccttcccgcagaggct

SEQ ID NO: 1243 - DNA, 24 bp, Artificial Sequence
  Description of Artificial Sequence: Synthetic oligonucleotide
acgatgacttccagcttcatccaa

SEQ ID NO: 1244 - DNA, 19 bp, Artificial Sequence
  Description of Artificial Sequence: Synthetic oligonucleotide
cgccacccattctggctgt

SEQ ID NO: 1245 - DNA, 18 bp, Artificial Sequence
  Description of Artificial Sequence: Synthetic oligonucleotide
cctgaggggcttggggaa

SEQ ID NO: 1246 - DNA, 21 bp, Artificial Sequence
  Description of Artificial Sequence: Synthetic oligonucleotide
agccaggcgtcaccttccaca

SEQ ID NO: 1247 - DNA, 18 bp, Artificial Sequence
  Description of Artificial Sequence: Synthetic oligonucleotide
cgcccaagagccagcaaa

SEQ ID NO: 1248 - DNA, 29 bp, Artificial Sequence
  Description of Artificial Sequence: Synthetic oligonucleotide
ccaagaagagaaggaaggaatatatatta

SEQ ID NO: 1249 - DNA, 24 bp, Artificial Sequence
  Description of Artificial Sequence: Synthetic oligonucleotide
cactctgtgtcagggggtcagaga

SEQ ID NO: 1250 - DNA, 21 bp, Artificial Sequence
  Description of Artificial Sequence: Synthetic oligonucleotide
acgctgacctgtgctccctct

SEQ ID NO: 1251 - DNA, 20 bp, Artificial Sequence
  Description of Artificial Sequence: Synthetic oligonucleotide
tcttggagatggggagtttt

SEQ ID NO: 1252 - DNA, 21 bp, Artificial Sequence
  Description of Artificial Sequence: Synthetic oligonucleotide
agcctgaggccacagtcccaa

SEQ ID NO: 1253 - DNA, 19 bp, Artificial Sequence
  Description of Artificial Sequence: Synthetic oligonucleotide
gggtgctggggcagagaga

SEQ ID NO: 1254 - DNA, 21 bp, Artificial Sequence
  Description of Artificial Sequence: Synthetic oligonucleotide
actccgcaggccctccagtct

SEQ ID NO: 1255 - DNA, 30 bp, Artificial Sequence
  Description of Artificial Sequence: Synthetic oligonucleotide
aaatagagaatatagggaaaacacctagaa

SEQ ID NO: 1256 - DNA, 30 bp, Artificial Sequence
  Description of Artificial Sequence: Synthetic oligonucleotide
gaatccatttataagtttttgtttaagaaa

SEQ ID NO: 1257 - DNA, 30 bp, Artificial Sequence
  Description of Artificial Sequence: Synthetic oligonucleotide
tgtatattatctgtgtttacgtggtagaga

SEQ ID NO: 1258 - DNA, 28 bp, Artificial Sequence
  Description of Artificial Sequence: Synthetic oligonucleotide
aacttaccaaaattgacagtagaagaaa

SEQ ID NO: 1259 - DNA, 28 bp, Artificial Sequence
  Description of Artificial Sequence: Synthetic oligonucleotide
aacttaccaaaattgacagtagaagaaa

SEQ ID NO: 1260 - DNA, 30 bp, Artificial Sequence
  Description of Artificial Sequence: Synthetic oligonucleotide
agattcgaggttatttacacaactatacta

SEQ ID NO: 1261 - DNA, 29 bp, Artificial Sequence
  Description of Artificial Sequence: Synthetic oligonucleotide
cccatgtttgtatatatacctgtgtgtat

SEQ ID NO: 1262 - DNA, 30 bp, Artificial Sequence
  Description of Artificial Sequence: Synthetic oligonucleotide
ggacacatatttatcagccaactataaata

SEQ ID NO: 1263 - DNA, 18 bp, Artificial Sequence
  Description of Artificial Sequence: Synthetic oligonucleotide
tgggcccagccccagcaa

SEQ ID NO: 1264 - DNA, 18 bp, Artificial Sequence
  Description of Artificial Sequence: Synthetic oligonucleotide
gggcgcccagcccaaccc

SEQ ID NO: 1265 - DNA, 20 bp, Artificial Sequence
  Description of Artificial Sequence: Synthetic oligonucleotide
ctcactgctgggccggtcac

SEQ ID NO: 1266 - DNA, 30 bp, Artificial Sequence
  Description of Artificial Sequence: Synthetic oligonucleotide
aattagctaatcaggtttagtttttttcta

SEQ ID NO: 1267 - DNA, 27 bp, Artificial Sequence
  Description of Artificial Sequence: Synthetic oligonucleotide
ccaaggtgttgggattacaagcataaa

SEQ ID NO: 1268 - DNA, 30 bp, Artificial Sequence
  Description of Artificial Sequence: Synthetic oligonucleotide
acatatatgaagaaaactatggacatttta

SEQ ID NO: 1269 - DNA, 27 bp, Artificial Sequence
  Description of Artificial Sequence: Synthetic oligonucleotide
aatctctggagtttaacaaatgatttt

SEQ ID NO: 1270 - DNA, 26 bp, Artificial Sequence
  Description of Artificial Sequence: Synthetic oligonucleotide
cctgaaggaagtggtcactagaccag

SEQ ID NO: 1271 - DNA, 30 bp, Artificial Sequence
  Description of Artificial Sequence: Synthetic oligonucleotide
agttagtaagaaaaataagatgaggatgaa

SEQ ID NO: 1272 - DNA, 28 bp, Artificial Sequence
  Description of Artificial Sequence: Synthetic oligonucleotide
ggcaaaaaagtgagactctgtttcaaat

SEQ ID NO: 1273 - DNA, 30 bp, Artificial Sequence
  Description of Artificial Sequence: Synthetic oligonucleotide
caggtgaaatacaaaaaattcatgaaaatt

SEQ ID NO: 1274 - DNA, 18 bp, Artificial Sequence
  Description of Artificial Sequence: Synthetic oligonucleotide
agaagcaatcgcacaccg

SEQ ID NO: 1275 - DNA, 30 bp, Artificial Sequence
  Description of Artificial Sequence: Synthetic oligonucleotide
gacctttatatctttctagaaacgtatcct

SEQ ID NO: 1276 - DNA, 18 bp, Artificial Sequence
  Description of Artificial Sequence: Synthetic oligonucleotide
aggacccggggagccgct

SEQ ID NO: 1277 - DNA, 18 bp, Artificial Sequence
  Description of Artificial Sequence: Synthetic oligonucleotide
gcgctgcgtggatggcca

SEQ ID NO: 1278 - DNA, 18 bp, Artificial Sequence
  Description of Artificial Sequence: Synthetic oligonucleotide
accgccttcggggcctga

SEQ ID NO: 1279 - DNA, 30 bp, Artificial Sequence
  Description of Artificial Sequence: Synthetic oligonucleotide
tgggttatgtaaagtgacatttatattaat

SEQ ID NO: 1280 - DNA, 18 bp, Artificial Sequence
  Description of Artificial Sequence: Synthetic oligonucleotide
ccgaaggcggtgcatgga

SEQ ID NO: 1281 - DNA, 30 bp, Artificial Sequence
  Description of Artificial Sequence: Synthetic oligonucleotide
caaatacttgactcagtattttgaagctaa

SEQ ID NO: 1282 - DNA, 27 bp, Artificial Sequence
  Description of Artificial Sequence: Synthetic oligonucleotide
tggtaggtagaaatgagggacgtcatg

SEQ ID NO: 1283 - DNA, 27 bp, Artificial Sequence
  Description of Artificial Sequence: Synthetic oligonucleotide
atggatcacatattgaaatgataatat

SEQ ID NO: 1284 - DNA, 28 bp, Artificial Sequence
  Description of Artificial Sequence: Synthetic oligonucleotide
tctgcagatagtttgaaatttatacatt

SEQ ID NO: 1285 - DNA, 18 bp, Artificial Sequence
  Description of Artificial Sequence: Synthetic oligonucleotide
cccaccgagccccgccct

SEQ ID NO: 1286 - DNA, 28 bp, Artificial Sequence
  Description of Artificial Sequence: Synthetic oligonucleotide
aacaaaacaaacaaacaaacaaacaaaa

SEQ ID NO: 1287 - DNA, 24 bp, Artificial Sequence
  Description of Artificial Sequence: Synthetic oligonucleotide
ctacttaccagcccccctacacat

SEQ ID NO: 1288 - DNA, 30 bp, Artificial Sequence
  Description of Artificial Sequence: Synthetic oligonucleotide
aaataacttttactataaggggaaagattt

SEQ ID NO: 1289 - DNA, 19 bp, Artificial Sequence
  Description of Artificial Sequence: Synthetic oligonucleotide
cgccgcctgctcatctcca

SEQ ID NO: 1290 - DNA, 23 bp, Artificial Sequence
  Description of Artificial Sequence: Synthetic oligonucleotide
cttccatttttgtcccctggaca

SEQ ID NO: 1291 - DNA, 29 bp, Artificial Sequence
  Description of Artificial Sequence: Synthetic oligonucleotide
gacatgtaggcattatctaatggtcaaat

SEQ ID NO: 1292 - DNA, 28 bp, Artificial Sequence
  Description of Artificial Sequence: Synthetic oligonucleotide
agggaacaaataataaagaaacaagata

SEQ ID NO: 1293 - DNA, 30 bp, Artificial Sequence
  Description of Artificial Sequence: Synthetic oligonucleotide
agatccttaataagtacctcttaaatgaat

SEQ ID NO: 1294 - DNA, 30 bp, Artificial Sequence
  Description of Artificial Sequence: Synthetic oligonucleotide
gactacatcagtagcttataattcttttga

SEQ ID NO: 1295 - DNA, 19 bp, Artificial Sequence
  Description of Artificial Sequence: Synthetic oligonucleotide
tgccatgttgcctgagatt

SEQ ID NO: 1296 - DNA, 30 bp, Artificial Sequence
  Description of Artificial Sequence: Synthetic oligonucleotide
ttaaatgattgaagtataatttacagacaa

SEQ ID NO: 1297 - DNA, 20 bp, Artificial Sequence
  Description of Artificial Sequence: Synthetic oligonucleotide
ggtaatttgtcactgcagca

SEQ ID NO: 1298 - DNA, 21 bp, Artificial Sequence
  Description of Artificial Sequence: Synthetic oligonucleotide
atgccacacataatttatcgt

SEQ ID NO: 1299 - DNA, 18 bp, Artificial Sequence
  Description of Artificial Sequence: Synthetic oligonucleotide
ccagggcccccaagagca

SEQ ID NO: 1300 - DNA, 27 bp, Artificial Sequence
  Description of Artificial Sequence: Synthetic oligonucleotide
gtgagactccatctcaaaaaaaaaaaa

SEQ ID NO: 1301 - DNA, 30 bp, Artificial Sequence
  Description of Artificial Sequence: Synthetic oligonucleotide
tctgaattatttcagattacatacataaaa

SEQ ID NO: 1302 - DNA, 23 bp, Artificial Sequence
  Description of Artificial Sequence: Synthetic oligonucleotide
tggtccctcccccaataggtagg

SEQ ID NO: 1303 - DNA, 18 bp, Artificial Sequence
  Description of Artificial Sequence: Synthetic oligonucleotide
cccatggccccgacgtca

SEQ ID NO: 1304 - DNA, 26 bp, Artificial Sequence
  Description of Artificial Sequence: Synthetic oligonucleotide
ggatctgtattaggtgctccagagca

SEQ ID NO: 1305 - DNA, 30 bp, Artificial Sequence
  Description of Artificial Sequence: Synthetic oligonucleotide
tttaactctaatagtctcctttgattatgt

SEQ ID NO: 1306 - DNA, 23 bp, Artificial Sequence
  Description of Artificial Sequence: Synthetic oligonucleotide
ttgtctgggatgttgctcctcat

SEQ ID NO: 1307 - DNA, 22 bp, Artificial Sequence
  Description of Artificial Sequence: Synthetic oligonucleotide
atcgggtccaaatgcaagacct

SEQ ID NO: 1308 - DNA, 24 bp, Artificial Sequence
  Description of Artificial Sequence: Synthetic oligonucleotide
gaaaacacccccactgtgttgagt

SEQ ID NO: 1309 - DNA, 23 bp, Artificial Sequence
  Description of Artificial Sequence: Synthetic oligonucleotide
agccacatctcctgtgggatctc

SEQ ID NO: 1310 - DNA, 24 bp, Artificial Sequence
  Description of Artificial Sequence: Synthetic oligonucleotide
ggctgaattgctggatgattctgt

SEQ ID NO: 1311 - DNA, 25 bp, Artificial Sequence
  Description of Artificial Sequence: Synthetic oligonucleotide
agatgcagtgaaggcacaacctact

SEQ ID NO: 1312 - DNA, 23 bp, Artificial Sequence
  Description of Artificial Sequence: Synthetic oligonucleotide
tgtccacttgtgcctcccacttc

SEQ ID NO: 1313 - DNA, 18 bp, Artificial Sequence
  Description of Artificial Sequence: Synthetic oligonucleotide
gcttccccagcccggcct

SEQ ID NO: 1314 - DNA, 22 bp, Artificial Sequence
  Description of Artificial Sequence: Synthetic oligonucleotide
cagagcgaggctggtgagtgaa

SEQ ID NO: 1315 - DNA, 25 bp, Artificial Sequence
  Description of Artificial Sequence: Synthetic oligonucleotide
ccccatctctaccaaaaaacagaaa

SEQ ID NO: 1316 - DNA, 30 bp, Artificial Sequence
  Description of Artificial Sequence: Synthetic oligonucleotide
ttgtagtaggcaagaaaaagaaataaatga

SEQ ID NO: 1317 - DNA, 25 bp, Artificial Sequence
  Description of Artificial Sequence: Synthetic oligonucleotide
gggagggaaaagggtcctatagaat

SEQ ID NO: 1318 - DNA, 23 bp, Artificial Sequence
  Description of Artificial Sequence: Synthetic oligonucleotide
gcctgaacctgaatcccctgtca

SEQ ID NO: 1319 - DNA, 21 bp, Artificial Sequence
  Description of Artificial Sequence: Synthetic oligonucleotide
agaatgctgcagatggtggca

SEQ ID NO: 1320 - DNA, 25 bp, Artificial Sequence
  Description of Artificial Sequence: Synthetic oligonucleotide
ggacactgcattcatttcttttggt

SEQ ID NO: 1321 - DNA, 22 bp, Artificial Sequence
  Description of Artificial Sequence: Synthetic oligonucleotide
cttctgcctccctcatccctca

SEQ ID NO: 1322 - DNA, 25 bp, Artificial Sequence
  Description of Artificial Sequence: Synthetic oligonucleotide
agcccatcacatgctcaatacattc

SEQ ID NO: 1323 - DNA, 22 bp, Artificial Sequence
  Description of Artificial Sequence: Synthetic oligonucleotide
gagtttgtgcagacgcacagaa

SEQ ID NO: 1324 - DNA, 18 bp, Artificial Sequence
  Description of Artificial Sequence: Synthetic oligonucleotide
ggcgcggagagtcccaga

SEQ ID NO: 1325 - DNA, 26 bp, Artificial Sequence
  Description of Artificial Sequence: Synthetic oligonucleotide
tcttgtgtcatatggcttcattgcta

SEQ ID NO: 1326 - DNA, 21 bp, Artificial Sequence
  Description of Artificial Sequence: Synthetic oligonucleotide
gtggtgcgagtgcgtgaatat

SEQ ID NO: 1327 - DNA, 26 bp, Artificial Sequence
  Description of Artificial Sequence: Synthetic oligonucleotide
cgggagtcacagatacattgtctgga

SEQ ID NO: 1328 - DNA, 25 bp, Artificial Sequence
  Description of Artificial Sequence: Synthetic oligonucleotide
agaagctgtagggaacaggcttgta

SEQ ID NO: 1329 - DNA, 22 bp, Artificial Sequence
  Description of Artificial Sequence: Synthetic oligonucleotide
gaatgctgcagatggtggcaga

SEQ ID NO: 1330 - DNA, 18 bp, Artificial Sequence
  Description of Artificial Sequence: Synthetic oligonucleotide
ctcctccgcgcaggggct

SEQ ID NO: 1331 - DNA, 23 bp, Artificial Sequence
  Description of Artificial Sequence: Synthetic oligonucleotide
ggacctgggacttcgtcctgatt

SEQ ID NO: 1332 - DNA, 26 bp, Artificial Sequence
  Description of Artificial Sequence: Synthetic oligonucleotide
gggctgttcagtgtcacaacttacta

SEQ ID NO: 1333 - DNA, 24 bp, Artificial Sequence
  Description of Artificial Sequence: Synthetic oligonucleotide
aaagatggagacatctcagcccct

SEQ ID NO: 1334 - DNA, 24 bp, Artificial Sequence
  Description of Artificial Sequence: Synthetic oligonucleotide
ggtgaggacaaggagcaggagaaa

SEQ ID NO: 1335 - DNA, 28 bp, Artificial Sequence
  Description of Artificial Sequence: Synthetic oligonucleotide
catagtagattcctgatgggttttctct

SEQ ID NO: 1336 - DNA, 30 bp, Artificial Sequence
  Description of Artificial Sequence: Synthetic oligonucleotide
agaaaatatattctgtatgatttcaatgtt

SEQ ID NO: 1337 - DNA, 21 bp, Artificial Sequence
  Description of Artificial Sequence: Synthetic oligonucleotide
gggaaaggcctgggtaatgga

SEQ ID NO: 1338 - DNA, 22 bp, Artificial Sequence
  Description of Artificial Sequence: Synthetic oligonucleotide
tgggcagaggggacacaactaa

SEQ ID NO: 1339 - DNA, 30 bp, Artificial Sequence
  Description of Artificial Sequence: Synthetic oligonucleotide
tcacagaaaattataaaatgtaaaacacta

SEQ ID NO: 1340 - DNA, 23 bp, Artificial Sequence
  Description of Artificial Sequence: Synthetic oligonucleotide
accccaataaccacccttggtta

SEQ ID NO: 1341 - DNA, 22 bp, Artificial Sequence
  Description of Artificial Sequence: Synthetic oligonucleotide
gtcccttgagggacttcagatg

SEQ ID NO: 1342 - DNA, 18 bp, Artificial Sequence
  Description of Artificial Sequence: Synthetic oligonucleotide
cgcaggacccggggagca

SEQ ID NO: 1343 - DNA, 25 bp, Artificial Sequence
  Description of Artificial Sequence: Synthetic oligonucleotide
ctggtaggaatgcaaaaaatgtggt

SEQ ID NO: 1344 - DNA, 24 bp, Artificial Sequence
  Description of Artificial Sequence: Synthetic oligonucleotide
ctggtcccaggattgatagcaaca

SEQ ID NO: 1345 - DNA, 22 bp, Artificial Sequence
  Description of Artificial Sequence: Synthetic oligonucleotide
ctgccatagctggagagccctt

SEQ ID NO: 1346 - DNA, 25 bp, Artificial Sequence
  Description of Artificial Sequence: Synthetic oligonucleotide
cacaatctattgtctggcaccacct

SEQ ID NO: 1347 - DNA, 26 bp, Artificial Sequence
  Description of Artificial Sequence: Synthetic oligonucleotide
gagtggaaagatggtcagagaatgga

SEQ ID NO: 1348 - DNA, 25 bp, Artificial Sequence
  Description of Artificial Sequence: Synthetic oligonucleotide
tccccactgtctactctgatagcct

SEQ ID NO: 1349 - DNA, 21 bp, Artificial Sequence
  Description of Artificial Sequence: Synthetic oligonucleotide
ggtccctctggacctcagggt

SEQ ID NO: 1350 - DNA, 25 bp, Artificial Sequence
  Description of Artificial Sequence: Synthetic oligonucleotide
ggaactttgcccacctttgaagatg

SEQ ID NO: 1351 - DNA, 23 bp, Artificial Sequence
  Description of Artificial Sequence: Synthetic oligonucleotide
gcactgtcactgcctggggtaga

SEQ ID NO: 1352 - DNA, 28 bp, Artificial Sequence
  Description of Artificial Sequence: Synthetic oligonucleotide
aattgcatttgctttaaatgtatcatca

SEQ ID NO: 1353 - DNA, 21 bp, Artificial Sequence
  Description of Artificial Sequence: Synthetic oligonucleotide
gggtatccgggcgctacgtaa

SEQ ID NO: 1354 - DNA, 21 bp, Artificial Sequence
  Description of Artificial Sequence: Synthetic oligonucleotide
agtggagcttggggtccagca

SEQ ID NO: 1355 - DNA, 24 bp, Artificial Sequence
  Description of Artificial Sequence: Synthetic oligonucleotide
gctcccctttgcctaaaccctatt

SEQ ID NO: 1356 - DNA, 27 bp, Artificial Sequence
  Description of Artificial Sequence: Synthetic oligonucleotide
tgaagaaatgagggaagagataggaat

SEQ ID NO: 1357 - DNA, 21 bp, Artificial Sequence
  Description of Artificial Sequence: Synthetic oligonucleotide
ccccacagctttgatggcagt

SEQ ID NO: 1358 - DNA, 25 bp, Artificial Sequence
  Description of Artificial Sequence: Synthetic oligonucleotide
tctccctgaatcctcaacgctaata

SEQ ID NO: 1359 - DNA, 23 bp, Artificial Sequence
  Description of Artificial Sequence: Synthetic oligonucleotide
caccacatcctgaaagatggcac

SEQ ID NO: 1360 - DNA, 30 bp, Artificial Sequence
  Description of Artificial Sequence: Synthetic oligonucleotide
ttctttgtgttagcaaacttatttatagat

SEQ ID NO: 1361 - DNA, 26 bp, Artificial Sequence
  Description of Artificial Sequence: Synthetic oligonucleotide
aatggtagaccaaaatccaaccatta

SEQ ID NO: 1362 - DNA, 22 bp, Artificial Sequence
  Description of Artificial Sequence: Synthetic oligonucleotide
cagcctgtcctggacagttcct

SEQ ID NO: 1363 - DNA, 22 bp, Artificial Sequence
  Description of Artificial Sequence: Synthetic oligonucleotide
acccaggggcctcagaaagact

SEQ ID NO: 1364 - DNA, 24 bp, Artificial Sequence
  Description of Artificial Sequence: Synthetic oligonucleotide
ttccacttggtcatgaagaatgaa

SEQ ID NO: 1365 - DNA, 30 bp, Artificial Sequence
  Description of Artificial Sequence: Synthetic oligonucleotide
gctttcctgtttttgtttttcttcttcttt

SEQ ID NO: 1366 - DNA, 19 bp, Artificial Sequence
  Description of Artificial Sequence: Synthetic oligonucleotide
catgccctgctgcactcca

SEQ ID NO: 1367 - DNA, 27 bp, Artificial Sequence
  Description of Artificial Sequence: Synthetic oligonucleotide
ttctcaggtctttatttgctctctcaa

SEQ ID NO: 1368 - DNA, 24 bp, Artificial Sequence
  Description of Artificial Sequence: Synthetic oligonucleotide
agcctcaacacatcctcttccctt

SEQ ID NO: 1369 - DNA, 24 bp, Artificial Sequence
  Description of Artificial Sequence: Synthetic oligonucleotide
ttgtagtgatggggacctgatcct

SEQ ID NO: 1370 - DNA, 25 bp, Artificial Sequence
  Description of Artificial Sequence: Synthetic oligonucleotide
gactcagaggagctggagtcagact

SEQ ID NO: 1371 - DNA, 26 bp, Artificial Sequence
  Description of Artificial Sequence: Synthetic oligonucleotide
tgctattccatcactgggtattcctt

SEQ ID NO: 1372 - DNA, 22 bp, Artificial Sequence
  Description of Artificial Sequence: Synthetic oligonucleotide
gcctctgtggtcacagctccca

SEQ ID NO: 1373 - DNA, 27 bp, Artificial Sequence
  Description of Artificial Sequence: Synthetic oligonucleotide
tctacaatggcattcaataaagtgcat

SEQ ID NO: 1374 - DNA, 27 bp, Artificial Sequence
  Description of Artificial Sequence: Synthetic oligonucleotide
tcctttctgtatatctgggtcaccatt

SEQ ID NO: 1375 - DNA, 23 bp, Artificial Sequence
  Description of Artificial Sequence: Synthetic oligonucleotide
ccactccgaagtcagcacagaga

SEQ ID NO: 1376 - DNA, 24 bp, Artificial Sequence
  Description of Artificial Sequence: Synthetic oligonucleotide
cccaaaatgcatgaaattcccttc

SEQ ID NO: 1377 - DNA, 24 bp, Artificial Sequence
  Description of Artificial Sequence: Synthetic oligonucleotide
cccctctccccacttattctccta

SEQ ID NO: 1378 - DNA, 25 bp, Artificial Sequence
  Description of Artificial Sequence: Synthetic oligonucleotide
tctgaaatgccctgtctatagggca

SEQ ID NO: 1379 - DNA, 21 bp, Artificial Sequence
  Description of Artificial Sequence: Synthetic oligonucleotide
cagtcacccccacttcccact

SEQ ID NO: 1380 - DNA, 26 bp, Artificial Sequence
  Description of Artificial Sequence: Synthetic oligonucleotide
ccccccacttcttgaaaagacttatt

SEQ ID NO: 1381 - DNA, 21 bp, Artificial Sequence
  Description of Artificial Sequence: Synthetic oligonucleotide
ctgctaagccgctgtccctct

SEQ ID NO: 1382 - DNA, 20 bp, Artificial Sequence
  Description of Artificial Sequence: Synthetic oligonucleotide
caccaaccaagggctgctga

SEQ ID NO: 1383 - DNA, 22 bp, Artificial Sequence
  Description of Artificial Sequence: Synthetic oligonucleotide
gaggcttcacccagttagccca

SEQ ID NO: 1384 - DNA, 24 bp, Artificial Sequence
  Description of Artificial Sequence: Synthetic oligonucleotide
tcctccactagcattatccccagg

SEQ ID NO: 1385 - DNA, 26 bp, Artificial Sequence
  Description of Artificial Sequence: Synthetic oligonucleotide
caatggaaagtgaacaaaaggttcct

SEQ ID NO: 1386 - DNA, 25 bp, Artificial Sequence
  Description of Artificial Sequence: Synthetic oligonucleotide
tggggttaactcccaataaatccat

SEQ ID NO: 1387 - DNA, 23 bp, Artificial Sequence
  Description of Artificial Sequence: Synthetic oligonucleotide
tgctgaattgtcactcatgggct

SEQ ID NO: 1388 - DNA, 22 bp, Artificial Sequence
  Description of Artificial Sequence: Synthetic oligonucleotide
gtcaatggcgtcactcaccagt

SEQ ID NO: 1389 - DNA, 23 bp, Artificial Sequence
  Description of Artificial Sequence: Synthetic oligonucleotide
tcttctccaaggcctccctctta

SEQ ID NO: 1390 - DNA, 26 bp, Artificial Sequence
  Description of Artificial Sequence: Synthetic oligonucleotide
cttttctctggacatatgcagcatta

SEQ ID NO: 1391 - DNA, 26 bp, Artificial Sequence
  Description of Artificial Sequence: Synthetic oligonucleotide
ggtcaaataaaagaaggaatggcaaa

SEQ ID NO: 1392 - DNA, 26 bp, Artificial Sequence
  Description of Artificial Sequence: Synthetic oligonucleotide
tcagagtatcctttctcctttgcaat

SEQ ID NO: 1393 - DNA, 26 bp, Artificial Sequence
  Description of Artificial Sequence: Synthetic oligonucleotide
tgtgtttgtgaccagaaataagccat

SEQ ID NO: 1394 - DNA, 23 bp, Artificial Sequence
  Description of Artificial Sequence: Synthetic oligonucleotide
tcctctccccttctcaccttgaa

SEQ ID NO: 1395 - DNA, 26 bp, Artificial Sequence
  Description of Artificial Sequence: Synthetic oligonucleotide
tttatcattgttaccagcaagagggt

SEQ ID NO: 1396 - DNA, 23 bp, Artificial Sequence
  Description of Artificial Sequence: Synthetic oligonucleotide
aggatctcatttggcatcctgca

SEQ ID NO: 1397 - DNA, 27 bp, Artificial Sequence
  Description of Artificial Sequence: Synthetic oligonucleotide
cagtagggagatgacagagcattgtat

SEQ ID NO: 1398 - DNA, 23 bp, Artificial Sequence
  Description of Artificial Sequence: Synthetic oligonucleotide
atgtggccagtggctaccgtatc

SEQ ID NO: 1399 - DNA, 27 bp, Artificial Sequence
  Description of Artificial Sequence: Synthetic oligonucleotide
cacaagtattttgcagcagctatcatt

SEQ ID NO: 1400 - DNA, 23 bp, Artificial Sequence
  Description of Artificial Sequence: Synthetic oligonucleotide
gagagctggagctgaagttccct

SEQ ID NO: 1401 - DNA, 23 bp, Artificial Sequence
  Description of Artificial Sequence: Synthetic oligonucleotide
aacagacagggacatcaggcaat

SEQ ID NO: 1402 - DNA, 21 bp, Artificial Sequence
  Description of Artificial Sequence: Synthetic oligonucleotide
accgttgtgccactggacgat

SEQ ID NO: 1403 - DNA, 23 bp, Artificial Sequence
  Description of Artificial Sequence: Synthetic oligonucleotide
aaccccccttctgagacttggat

SEQ ID NO: 1404 - DNA, 23 bp, Artificial Sequence
  Description of Artificial Sequence: Synthetic oligonucleotide
gggagatgggtaaagaggggaat

SEQ ID NO: 1405 - DNA, 20 bp, Artificial Sequence
  Description of Artificial Sequence: Synthetic oligonucleotide
gtgggagggagcgtgaggct

SEQ ID NO: 1406 - DNA, 25 bp, Artificial Sequence
  Description of Artificial Sequence: Synthetic oligonucleotide
ggctctccatgggttcttagagatt

SEQ ID NO: 1407 - DNA, 27 bp, Artificial Sequence
  Description of Artificial Sequence: Synthetic oligonucleotide
agggaactgaaagtcatttctcaagtc

SEQ ID NO: 1408 - DNA, 27 bp, Artificial Sequence
  Description of Artificial Sequence: Synthetic oligonucleotide
gctcttctcaccaaaacttaaggctct

SEQ ID NO: 1409 - DNA, 25 bp, Artificial Sequence
  Description of Artificial Sequence: Synthetic oligonucleotide
acagcctaaggagggaaacaaaaat

SEQ ID NO: 1410 - DNA, 21 bp, Artificial Sequence
  Description of Artificial Sequence: Synthetic oligonucleotide
ggtcatgagggaacggaagca

SEQ ID NO: 1411 - DNA, 24 bp, Artificial Sequence
  Description of Artificial Sequence: Synthetic oligonucleotide
tcaagtagtccgtgtctggcaagt

SEQ ID NO: 1412 - DNA, 25 bp, Artificial Sequence
  Description of Artificial Sequence: Synthetic oligonucleotide
attagaaaggttaaggaaccgctct

SEQ ID NO: 1413 - DNA, 28 bp, Artificial Sequence
  Description of Artificial Sequence: Synthetic oligonucleotide
aacaacccaggtatgctggtattaataa

SEQ ID NO: 1414 - DNA, 25 bp, Artificial Sequence
  Description of Artificial Sequence: Synthetic oligonucleotide
tcactgtgggtggaggtaatggtat

SEQ ID NO: 1415 - DNA, 18 bp, Artificial Sequence
  Description of Artificial Sequence: Synthetic oligonucleotide
cagccccagtgccctcca

SEQ ID NO: 1416 - DNA, 24 bp, Artificial Sequence
  Description of Artificial Sequence: Synthetic oligonucleotide
ggatggctgtcacacctgaaagtg

SEQ ID NO: 1417 - DNA, 25 bp, Artificial Sequence
  Description of Artificial Sequence: Synthetic oligonucleotide
aaacctgcacatataccccagaatt

SEQ ID NO: 1418 - DNA, 26 bp, Artificial Sequence
  Description of Artificial Sequence: Synthetic oligonucleotide
cctcctatgatgcttgtgtgaaactt

SEQ ID NO: 1419 - DNA, 22 bp, Artificial Sequence
  Description of Artificial Sequence: Synthetic oligonucleotide
ggatgtgttgaggctggaccaa

SEQ ID NO: 1420 - DNA, 22 bp, Artificial Sequence
  Description of Artificial Sequence: Synthetic oligonucleotide
agagcgcgctcatctttttcct

SEQ ID NO: 1421 - DNA, 21 bp, Artificial Sequence
  Description of Artificial Sequence: Synthetic oligonucleotide
atgcctcatttgcctctcgct

SEQ ID NO: 1422 - DNA, 19 bp, Artificial Sequence
  Description of Artificial Sequence: Synthetic oligonucleotide
atcgctggggcagggctat

SEQ ID NO: 1423 - DNA, 26 bp, Artificial Sequence
  Description of Artificial Sequence: Synthetic oligonucleotide
tggtccacagaatttttatagttgga

SEQ ID NO: 1424 - DNA, 22 bp, Artificial Sequence
  Description of Artificial Sequence: Synthetic oligonucleotide
ggtggaggatcctggctaccaa

SEQ ID NO: 1425 - DNA, 20 bp, Artificial Sequence
  Description of Artificial Sequence: Synthetic oligonucleotide
aggcctggcccatctgcaga

SEQ ID NO: 1426 - DNA, 24 bp, Artificial Sequence
  Description of Artificial Sequence: Synthetic oligonucleotide
caaccttgacagatgctccagctc

SEQ ID NO: 1427 - DNA, 24 bp, Artificial Sequence
  Description of Artificial Sequence: Synthetic oligonucleotide
cgggccaacaattactcacatttt

SEQ ID NO: 1428 - DNA, 23 bp, Artificial Sequence
  Description of Artificial Sequence: Synthetic oligonucleotide
gtctgagcatcgcatccaagata

SEQ ID NO: 1429 - DNA, 30 bp, Artificial Sequence
  Description of Artificial Sequence: Synthetic oligonucleotide
tctgttagacatagtctcagatgcctattt

SEQ ID NO: 1430 - DNA, 30 bp, Artificial Sequence
  Description of Artificial Sequence: Synthetic oligonucleotide
gagtgcactctgtactagacacaatagaaa

SEQ ID NO: 1431 - DNA, 29 bp, Artificial Sequence
  Description of Artificial Sequence: Synthetic oligonucleotide
tggattatgttgtccatctaaactttttc

SEQ ID NO: 1432 - DNA, 25 bp, Artificial Sequence
  Description of Artificial Sequence: Synthetic oligonucleotide
tctgaatcaccacctggagaaaagt

SEQ ID NO: 1433 - DNA, 22 bp, Artificial Sequence
  Description of Artificial Sequence: Synthetic oligonucleotide
tccaaaccctgttccaaagcct

SEQ ID NO: 1434 - DNA, 22 bp, Artificial Sequence
  Description of Artificial Sequence: Synthetic oligonucleotide
cctgcatcccataccgtttcca

SEQ ID NO: 1435 - DNA, 18 bp, Artificial Sequence
  Description of Artificial Sequence: Synthetic oligonucleotide
cctcgagggcctccacct

SEQ ID NO: 1436 - DNA, 28 bp, Artificial Sequence
  Description of Artificial Sequence: Synthetic oligonucleotide
caatttttctgattgcctcatatcaata

SEQ ID NO: 1437 - DNA, 21 bp, Artificial Sequence
  Description of Artificial Sequence: Synthetic oligonucleotide
cagggttgctgtgaggctcaa

SEQ ID NO: 1438 - DNA, 27 bp, Artificial Sequence
  Description of Artificial Sequence: Synthetic oligonucleotide
tgcttattccaaattgaacctctttaa

SEQ ID NO: 1439 - DNA, 20 bp, Artificial Sequence
  Description of Artificial Sequence: Synthetic oligonucleotide
cactggctccactgagggca

SEQ ID NO: 1440 - DNA, 22 bp, Artificial Sequence
  Description of Artificial Sequence: Synthetic oligonucleotide
actttgctgggacagggaggct

SEQ ID NO: 1441 - DNA, 28 bp, Artificial Sequence
  Description of Artificial Sequence: Synthetic oligonucleotide
gttccatggactcttaggaattagacta

SEQ ID NO: 1442 - DNA, 20 bp, Artificial Sequence
  Description of Artificial Sequence: Synthetic oligonucleotide
ctgcctggcccagccttctg

SEQ ID NO: 1443 - DNA, 29 bp, Artificial Sequence
  Description of Artificial Sequence: Synthetic oligonucleotide
ttaagtattcactatgcatcaagtgcttt

SEQ ID NO: 1444 - DNA, 24 bp, Artificial Sequence
  Description of Artificial Sequence: Synthetic oligonucleotide
caccagtgtgcagtgacctgattt

SEQ ID NO: 1445 - DNA, 24 bp, Artificial Sequence
  Description of Artificial Sequence: Synthetic oligonucleotide
cctgaacactgtcattcacccaat

SEQ ID NO: 1446 - DNA, 24 bp, Artificial Sequence
  Description of Artificial Sequence: Synthetic oligonucleotide
caattcctggttcactcctggaca

SEQ ID NO: 1447 - DNA, 24 bp, Artificial Sequence
  Description of Artificial Sequence: Synthetic oligonucleotide
tctttggtgaagtagcccacagga

SEQ ID NO: 1448 - DNA, 23 bp, Artificial Sequence
  Description of Artificial Sequence: Synthetic oligonucleotide
ctgctttccaggcttggagtctt

SEQ ID NO: 1449 - DNA, 24 bp, Artificial Sequence
  Description of Artificial Sequence: Synthetic oligonucleotide
agaacgtgaacaggccaagaaaga

SEQ ID NO: 1450 - DNA, 23 bp, Artificial Sequence
  Description of Artificial Sequence: Synthetic oligonucleotide
acctgtggaagttgtgtccaccg

SEQ ID NO: 1451 - DNA, 25 bp, Artificial Sequence
  Description of Artificial Sequence: Synthetic oligonucleotide
cctaatggcaaggtcccataagctt

SEQ ID NO: 1452 - DNA, 22 bp, Artificial Sequence
  Description of Artificial Sequence: Synthetic oligonucleotide
attaatgggaaggctgcacggt

SEQ ID NO: 1453 - DNA, 22 bp, Artificial Sequence
  Description of Artificial Sequence: Synthetic oligonucleotide
ttgtgcagggttgtatccccaa

SEQ ID NO: 1454 - DNA, 25 bp, Artificial Sequence
  Description of Artificial Sequence: Synthetic oligonucleotide
ccacctcgttccaccctttagttat

SEQ ID NO: 1455 - DNA, 22 bp, Artificial Sequence
  Description of Artificial Sequence: Synthetic oligonucleotide
ggtcacctccagtggagtggta

SEQ ID NO: 1456 - DNA, 23 bp, Artificial Sequence
  Description of Artificial Sequence: Synthetic oligonucleotide
gccattgggaatagtgctgctat

SEQ ID NO: 1457 - DNA, 25 bp, Artificial Sequence
  Description of Artificial Sequence: Synthetic oligonucleotide
ggggggacgtaagggaagaataata

SEQ ID NO: 1458 - DNA, 23 bp, Artificial Sequence
  Description of Artificial Sequence: Synthetic oligonucleotide
actgtcatctccccattgccttt

SEQ ID NO: 1459 - DNA, 22 bp, Artificial Sequence
  Description of Artificial Sequence: Synthetic oligonucleotide
ccaagctcttggcctgagttgt

SEQ ID NO: 1460 - DNA, 25 bp, Artificial Sequence
  Description of Artificial Sequence: Synthetic oligonucleotide
actcaatgagcaggtccctcactat

SEQ ID NO: 1461 - DNA, 21 bp, Artificial Sequence
  Description of Artificial Sequence: Synthetic oligonucleotide
ggggtctgtcctcgaagcaga

SEQ ID NO: 1462 - DNA, 25 bp, Artificial Sequence
  Description of Artificial Sequence: Synthetic oligonucleotide
tctgtccctcctttctctgaatcct

SEQ ID NO: 1463 - DNA, 23 bp, Artificial Sequence
  Description of Artificial Sequence: Synthetic oligonucleotide
tacctgctgctcatccagccaga

SEQ ID NO: 1464 - DNA, 22 bp, Artificial Sequence
  Description of Artificial Sequence: Synthetic oligonucleotide
accgtcatccctacccaaggat

SEQ ID NO: 1465 - DNA, 24 bp, Artificial Sequence
  Description of Artificial Sequence: Synthetic oligonucleotide
gggacagcaaaccaagacaaaaat

SEQ ID NO: 1466 - DNA, 25 bp, Artificial Sequence
  Description of Artificial Sequence: Synthetic oligonucleotide
aagggaatgcccagtacctactgaa

SEQ ID NO: 1467 - DNA, 22 bp, Artificial Sequence
  Description of Artificial Sequence: Synthetic oligonucleotide
ctgttgctcgttcattgcccaa

SEQ ID NO: 1468 - DNA, 24 bp, Artificial Sequence
  Description of Artificial Sequence: Synthetic oligonucleotide
acatcttagcgtccagatgaccca

SEQ ID NO: 1469 - DNA, 25 bp, Artificial Sequence
  Description of Artificial Sequence: Synthetic oligonucleotide
tggagctaggattctggacatgaat

SEQ ID NO: 1470 - DNA, 23 bp, Artificial Sequence
  Description of Artificial Sequence: Synthetic oligonucleotide
ggaaaatgggaccaagaggtcct

SEQ ID NO: 1471 - DNA, 24 bp, Artificial Sequence
  Description of Artificial Sequence: Synthetic oligonucleotide
taaggccagtcttcagtgtccaat

SEQ ID NO: 1472 - DNA, 21 bp, Artificial Sequence
  Description of Artificial Sequence: Synthetic oligonucleotide
ctatgcatgcatgtggccgtt

SEQ ID NO: 1473 - DNA, 21 bp, Artificial Sequence
  Description of Artificial Sequence: Synthetic oligonucleotide
cactcttggagtcctgggggt

SEQ ID NO: 1474 - DNA, 25 bp, Artificial Sequence
  Description of Artificial Sequence: Synthetic oligonucleotide
ctgagtttgcagtggagagtgaaat

SEQ ID NO: 1475 - DNA, 22 bp, Artificial Sequence
  Description of Artificial Sequence: Synthetic oligonucleotide
ctggctgtggacctcagaaggg

SEQ ID NO: 1476 - DNA, 21 bp, Artificial Sequence
  Description of Artificial Sequence: Synthetic oligonucleotide
cccttacgggtgtgtcccctt

SEQ ID NO: 1477 - DNA, 26 bp, Artificial Sequence
  Description of Artificial Sequence: Synthetic oligonucleotide
tcactgctacaacatgcaaggaactc

SEQ ID NO: 1478 - DNA, 21 bp, Artificial Sequence
  Description of Artificial Sequence: Synthetic oligonucleotide
ccctcaccccattgcaagtgt

SEQ ID NO: 1479 - DNA, 25 bp, Artificial Sequence
  Description of Artificial Sequence: Synthetic oligonucleotide
tgcactcctaagctgcatatgcttt

SEQ ID NO: 1480 - DNA, 26 bp, Artificial Sequence
  Description of Artificial Sequence: Synthetic oligonucleotide
caggaatggagagaagggtaatggtt

SEQ ID NO: 1481 - DNA, 24 bp, Artificial Sequence
  Description of Artificial Sequence: Synthetic oligonucleotide
ccatgtatttgacttgcagcaggt

SEQ ID NO: 1482 - DNA, 24 bp, Artificial Sequence
  Description of Artificial Sequence: Synthetic oligonucleotide
caccccatgctttacagaactgaa

SEQ ID NO: 1483 - DNA, 22 bp, Artificial Sequence
  Description of Artificial Sequence: Synthetic oligonucleotide
taccccaggcagcaattgtgct

SEQ ID NO: 1484 - DNA, 25 bp, Artificial Sequence
  Description of Artificial Sequence: Synthetic oligonucleotide
gtggctccttacaattctctgtggt

SEQ ID NO: 1485 - DNA, 21 bp, Artificial Sequence
  Description of Artificial Sequence: Synthetic oligonucleotide
ctcatctccacccccacctgt

SEQ ID NO: 1486 - DNA, 26 bp, Artificial Sequence
  Description of Artificial Sequence: Synthetic oligonucleotide
gggccaagaggaaatactcagtttta

SEQ ID NO: 1487 - DNA, 25 bp, Artificial Sequence
  Description of Artificial Sequence: Synthetic oligonucleotide
tgtgtgtctgggagtgagaacttct

SEQ ID NO: 1488 - DNA, 24 bp, Artificial Sequence
  Description of Artificial Sequence: Synthetic oligonucleotide
gtctgtcctcagcagtctttccct

SEQ ID NO: 1489 - DNA, 26 bp, Artificial Sequence
  Description of Artificial Sequence: Synthetic oligonucleotide
tggggaacaccattgaagtaaaatca

SEQ ID NO: 1490 - DNA, 25 bp, Artificial Sequence
  Description of Artificial Sequence: Synthetic oligonucleotide
gaacaggagagaaacctgtttggaa

SEQ ID NO: 1491 - DNA, 24 bp, Artificial Sequence
  Description of Artificial Sequence: Synthetic oligonucleotide
ccaagtccttcattttgtccagga

SEQ ID NO: 1492 - DNA, 24 bp, Artificial Sequence
  Description of Artificial Sequence: Synthetic oligonucleotide
tgaattcttcagcctccctcttga

SEQ ID NO: 1493 - DNA, 24 bp, Artificial Sequence
  Description of Artificial Sequence: Synthetic oligonucleotide
gggaaataatgcccacaggactca

SEQ ID NO: 1494 - DNA, 26 bp, Artificial Sequence
  Description of Artificial Sequence: Synthetic oligonucleotide
caggccaatctggaagataaaaaagc

SEQ ID NO: 1495 - DNA, 25 bp, Artificial Sequence
  Description of Artificial Sequence: Synthetic oligonucleotide
ctccatccaaaagacacttctgctc

SEQ ID NO: 1496 - DNA, 23 bp, Artificial Sequence
  Description of Artificial Sequence: Synthetic oligonucleotide
ctcccagactctggcttcatgat

SEQ ID NO: 1497 - DNA, 26 bp, Artificial Sequence
  Description of Artificial Sequence: Synthetic oligonucleotide
tgccaggtaggatgctatcacaatat

SEQ ID NO: 1498 - DNA, 24 bp, Artificial Sequence
  Description of Artificial Sequence: Synthetic oligonucleotide
gctactcctcgagctgtctgacca

SEQ ID NO: 1499 - DNA, 25 bp, Artificial Sequence
  Description of Artificial Sequence: Synthetic oligonucleotide
aaatagctttgccctgtcatttcca

SEQ ID NO: 1500 - DNA, 26 bp, Artificial Sequence
  Description of Artificial Sequence: Synthetic oligonucleotide
ccactataacctacgggggaaaaaaa

SEQ ID NO: 1501 - DNA, 26 bp, Artificial Sequence
  Description of Artificial Sequence: Synthetic oligonucleotide
gctttttgcaactgcctaacatgtgt

SEQ ID NO: 1502 - DNA, 26 bp, Artificial Sequence
  Description of Artificial Sequence: Synthetic oligonucleotide
ggtctcagcgatgatcaagatatcat

SEQ ID NO: 1503 - DNA, 25 bp, Artificial Sequence
  Description of Artificial Sequence: Synthetic oligonucleotide
catcacttcctaagctcccaggact

SEQ ID NO: 1504 - DNA, 25 bp, Artificial Sequence
  Description of Artificial Sequence: Synthetic oligonucleotide
tgaatgcctggaaggtgaatacaca

SEQ ID NO: 1505 - DNA, 25 bp, Artificial Sequence
  Description of Artificial Sequence: Synthetic oligonucleotide
caatcaattaaatggtttgctgcct

SEQ ID NO: 1506 - DNA, 24 bp, Artificial Sequence
  Description of Artificial Sequence: Synthetic oligonucleotide
tgctcactggaatctccatgagct

SEQ ID NO: 1507 - DNA, 24 bp, Artificial Sequence
  Description of Artificial Sequence: Synthetic oligonucleotide
ccacgaatccagtgtaggacacaa

SEQ ID NO: 1508 - DNA, 26 bp, Artificial Sequence
  Description of Artificial Sequence: Synthetic oligonucleotide
cctctggaagctacaggtctgtttca

SEQ ID NO: 1509 - DNA, 24 bp, Artificial Sequence
  Description of Artificial Sequence: Synthetic oligonucleotide
ctccgatcctagactccattccct

SEQ ID NO: 1510 - DNA, 22 bp, Artificial Sequence
  Description of Artificial Sequence: Synthetic oligonucleotide
aggaccacgaggccatgaaaat

SEQ ID NO: 1511 - DNA, 21 bp, Artificial Sequence
  Description of Artificial Sequence: Synthetic oligonucleotide
ctggacttggcctcacggcta

SEQ ID NO: 1512 - DNA, 21 bp, Artificial Sequence
  Description of Artificial Sequence: Synthetic oligonucleotide
ctgaggccatcagcactgcag

SEQ ID NO: 1513 - DNA, 24 bp, Artificial Sequence
  Description of Artificial Sequence: Synthetic oligonucleotide
ggatttgtggtccttggattcaca

SEQ ID NO: 1514 - DNA, 25 bp, Artificial Sequence
  Description of Artificial Sequence: Synthetic oligonucleotide
ggggtatgctatggaatagggtgat

SEQ ID NO: 1515 - DNA, 25 bp, Artificial Sequence
  Description of Artificial Sequence: Synthetic oligonucleotide
ctgctcaagagaagcacatgaaaaa

SEQ ID NO: 1516 - DNA, 24 bp, Artificial Sequence
  Description of Artificial Sequence: Synthetic oligonucleotide
gccccagattccgtgtctaagaat

SEQ ID NO: 1517 - DNA, 25 bp, Artificial Sequence
  Description of Artificial Sequence: Synthetic oligonucleotide
ttttctgcctctcactggaatttta

SEQ ID NO: 1518 - DNA, 23 bp, Artificial Sequence
  Description of Artificial Sequence: Synthetic oligonucleotide
ggcatgtctcacatgatggcaga

SEQ ID NO: 1519 - DNA, 26 bp, Artificial Sequence
  Description of Artificial Sequence: Synthetic oligonucleotide
gctgtgcagtaatctaggctgaagga

SEQ ID NO: 1520 - DNA, 26 bp, Artificial Sequence
  Description of Artificial Sequence: Synthetic oligonucleotide
tcctactaagtgaaatgtggcatggt

SEQ ID NO: 1521 - DNA, 27 bp, Artificial Sequence
  Description of Artificial Sequence: Synthetic oligonucleotide
gcagactacatgcaaaagctatggtgt

SEQ ID NO: 1522 - DNA, 25 bp, Artificial Sequence
  Description of Artificial Sequence: Synthetic oligonucleotide
ttttttggttcctccgacttgtcta

SEQ ID NO: 1523 - DNA, 22 bp, Artificial Sequence
  Description of Artificial Sequence: Synthetic oligonucleotide
gctggccatctctccaggtcta

SEQ ID NO: 1524 - DNA, 25 bp, Artificial Sequence
  Description of Artificial Sequence: Synthetic oligonucleotide
tgaagggctacgtggagtgtaagga

SEQ ID NO: 1525 - DNA, 25 bp, Artificial Sequence
  Description of Artificial Sequence: Synthetic oligonucleotide
catgcatctgttgacataactgcat

SEQ ID NO: 1526 - DNA, 23 bp, Artificial Sequence
  Description of Artificial Sequence: Synthetic oligonucleotide
tagaaccctgctgggagattgct

SEQ ID NO: 1527 - DNA, 22 bp, Artificial Sequence
  Description of Artificial Sequence: Synthetic oligonucleotide
cccccactcggtctttccaata

SEQ ID NO: 1528 - DNA, 21 bp, Artificial Sequence
  Description of Artificial Sequence: Synthetic oligonucleotide
ctggtacctgcgcattgcaga

SEQ ID NO: 1529 - DNA, 25 bp, Artificial Sequence
  Description of Artificial Sequence: Synthetic oligonucleotide
tgaacaccactggagagtttcaaac

SEQ ID NO: 1530 - DNA, 27 bp, Artificial Sequence
  Description of Artificial Sequence: Synthetic oligonucleotide
gcagacactgatggtcttcagatcaca

SEQ ID NO: 1531 - DNA, 24 bp, Artificial Sequence
  Description of Artificial Sequence: Synthetic oligonucleotide
tcaaagcctgggacatttatttgt

SEQ ID NO: 1532 - DNA, 23 bp, Artificial Sequence
  Description of Artificial Sequence: Synthetic oligonucleotide
ggtggcacttgtctgcagtccta

SEQ ID NO: 1533 - DNA, 25 bp, Artificial Sequence
  Description of Artificial Sequence: Synthetic oligonucleotide
ccaaacctgcttccatcttttgatt

SEQ ID NO: 1534 - DNA, 22 bp, Artificial Sequence
  Description of Artificial Sequence: Synthetic oligonucleotide
aagggtgttgctgatgcctcct

SEQ ID NO: 1535 - DNA, 27 bp, Artificial Sequence
  Description of Artificial Sequence: Synthetic oligonucleotide
ccctagccagtcttgagtctcatcatt

SEQ ID NO: 1536 - DNA, 27 bp, Artificial Sequence
  Description of Artificial Sequence: Synthetic oligonucleotide
gggagtgtacggcagttaaggtagttt

SEQ ID NO: 1537 - DNA, 23 bp, Artificial Sequence
  Description of Artificial Sequence: Synthetic oligonucleotide
ggggccattgatccacacataca

SEQ ID NO: 1538 - DNA, 25 bp, Artificial Sequence
  Description of Artificial Sequence: Synthetic oligonucleotide
ttgttcttcctcaagaatgccaatt

SEQ ID NO: 1539 - DNA, 27 bp, Artificial Sequence
  Description of Artificial Sequence: Synthetic oligonucleotide
ccacaagacagttacctaggatgcctt

SEQ ID NO: 1540 - DNA, 23 bp, Artificial Sequence
  Description of Artificial Sequence: Synthetic oligonucleotide
tgttttcaccaggggtagtggtc

SEQ ID NO: 1541 - DNA, 21 bp, Artificial Sequence
  Description of Artificial Sequence: Synthetic oligonucleotide
cctccaccataggcttcccct

SEQ ID NO: 1542 - DNA, 27 bp, Artificial Sequence
  Description of Artificial Sequence: Synthetic oligonucleotide
caactcttaattggccctcaaaactta

SEQ ID NO: 1543 - DNA, 23 bp, Artificial Sequence
  Description of Artificial Sequence: Synthetic oligonucleotide
gcaagctcccaaagcatattcct

SEQ ID NO: 1544 - DNA, 23 bp, Artificial Sequence
  Description of Artificial Sequence: Synthetic oligonucleotide
caagggacttccagagattcggg

SEQ ID NO: 1545 - DNA, 26 bp, Artificial Sequence
  Description of Artificial Sequence: Synthetic oligonucleotide
ttgttgggtgatatggtaaatggata

SEQ ID NO: 1546 - DNA, 23 bp, Artificial Sequence
  Description of Artificial Sequence: Synthetic oligonucleotide
caactgaaaaaggcagggttgac

SEQ ID NO: 1547 - DNA, 23 bp, Artificial Sequence
  Description of Artificial Sequence: Synthetic oligonucleotide
cctaaaacactccctcgggctat

SEQ ID NO: 1548 - DNA, 22 bp, Artificial Sequence
  Description of Artificial Sequence: Synthetic oligonucleotide
ctgtgttttccagcacagccct

SEQ ID NO: 1549 - DNA, 26 bp, Artificial Sequence
  Description of Artificial Sequence: Synthetic oligonucleotide
tttatgggcagaacatttgaaagaat

SEQ ID NO: 1550 - DNA, 27 bp, Artificial Sequence
  Description of Artificial Sequence: Synthetic oligonucleotide
gcatagttttgagtttgtgcctctttc

SEQ ID NO: 1551 - DNA, 25 bp, Artificial Sequence
  Description of Artificial Sequence: Synthetic oligonucleotide
tggctacaagtttatgccccagtaa

SEQ ID NO: 1552 - DNA, 24 bp, Artificial Sequence
  Description of Artificial Sequence: Synthetic oligonucleotide
tgatccagcaggaaaaaagaggat

SEQ ID NO: 1553 - DNA, 19 bp, Artificial Sequence
  Description of Artificial Sequence: Synthetic oligonucleotide
cgcacttttcagctgcgga

SEQ ID NO: 1554 - DNA, 26 bp, Artificial Sequence
  Description of Artificial Sequence: Synthetic oligonucleotide
ttcagtgtttgtctcttgcagaaaca

SEQ ID NO: 1555 - DNA, 27 bp, Artificial Sequence
  Description of Artificial Sequence: Synthetic oligonucleotide
catgtgggatccacaacactttaattt

SEQ ID NO: 1556 - DNA, 27 bp, Artificial Sequence
  Description of Artificial Sequence: Synthetic oligonucleotide
tctagattcgtgcctgaatgaaattta

SEQ ID NO: 1557 - DNA, 24 bp, Artificial Sequence
  Description of Artificial Sequence: Synthetic oligonucleotide
acctgggcaatgaagtcaacacta

SEQ ID NO: 1558 - DNA, 24 bp, Artificial Sequence
  Description of Artificial Sequence: Synthetic oligonucleotide
attccactgatcttgatgttgcat

SEQ ID NO: 1559 - DNA, 20 bp, Artificial Sequence
  Description of Artificial Sequence: Synthetic oligonucleotide
gtgggcagtgggttttgcct

SEQ ID NO: 1560 - DNA, 23 bp, Artificial Sequence
  Description of Artificial Sequence: Synthetic oligonucleotide
cgctcatctccatggctatcgat

SEQ ID NO: 1561 - DNA, 27 bp, Artificial Sequence
  Description of Artificial Sequence: Synthetic oligonucleotide
ccaaaaagtggaagaagtgtagctgga

SEQ ID NO: 1562 - DNA, 27 bp, Artificial Sequence
  Description of Artificial Sequence: Synthetic oligonucleotide
gctgggaacagggagaataagagaagt

SEQ ID NO: 1563 - DNA, 26 bp, Artificial Sequence
  Description of Artificial Sequence: Synthetic oligonucleotide
gattagcatagccattgtgggaaaca

SEQ ID NO: 1564 - DNA, 20 bp, Artificial Sequence
  Description of Artificial Sequence: Synthetic oligonucleotide
tctgaggctcccttgccccg

SEQ ID NO: 1565 - DNA, 26 bp, Artificial Sequence
  Description of Artificial Sequence: Synthetic oligonucleotide
aaatgagttgatttggaacacctcca

SEQ ID NO: 1566 - DNA, 19 bp, Artificial Sequence
  Description of Artificial Sequence: Synthetic oligonucleotide
gtgagcaagggtcggggat

SEQ ID NO: 1567 - DNA, 21 bp, Artificial Sequence
  Description of Artificial Sequence: Synthetic oligonucleotide
agcacaggggctttgggttgt

SEQ ID NO: 1568 - DNA, 25 bp, Artificial Sequence
  Description of Artificial Sequence: Synthetic oligonucleotide
ttgatgcttcctaaccatgaatgta

SEQ ID NO: 1569 - DNA, 27 bp, Artificial Sequence
  Description of Artificial Sequence: Synthetic oligonucleotide
atgaaggactgccttcaaataattcat

SEQ ID NO: 1570 - DNA, 26 bp, Artificial Sequence
  Description of Artificial Sequence: Synthetic oligonucleotide
tgagatagaaatggttctttgtggca

SEQ ID NO: 1571 - DNA, 24 bp, Artificial Sequence
  Description of Artificial Sequence: Synthetic oligonucleotide
aggcgttcgaaaattgtttcctct

SEQ ID NO: 1572 - DNA, 19 bp, Artificial Sequence
  Description of Artificial Sequence: Synthetic oligonucleotide
agcaggcctctcgagggca

SEQ ID NO: 1573 - DNA, 22 bp, Artificial Sequence
  Description of Artificial Sequence: Synthetic oligonucleotide
ctgcagctccgactctgagcca

SEQ ID NO: 1574 - DNA, 27 bp, Artificial Sequence
  Description of Artificial Sequence: Synthetic oligonucleotide
ttgtgaaatgcagtactgttaccctcg

SEQ ID NO: 1575 - DNA, 25 bp, Artificial Sequence
  Description of Artificial Sequence: Synthetic oligonucleotide
gccagtcatagctgtcaacaatcca

SEQ ID NO: 1576 - DNA, 22 bp, Artificial Sequence
  Description of Artificial Sequence: Synthetic oligonucleotide
aggtactcaacccgctctggga

SEQ ID NO: 1577 - DNA, 24 bp, Artificial Sequence
  Description of Artificial Sequence: Synthetic oligonucleotide
ccaaagatgaaatgtcccaggagt

SEQ ID NO: 1578 - DNA, 27 bp, Artificial Sequence
  Description of Artificial Sequence: Synthetic oligonucleotide
catgatcctggtgatttcaaagactat

SEQ ID NO: 1579 - DNA, 25 bp, Artificial Sequence
  Description of Artificial Sequence: Synthetic oligonucleotide
cctcattaggcagttgtgaggaata

SEQ ID NO: 1580 - DNA, 25 bp, Artificial Sequence
  Description of Artificial Sequence: Synthetic oligonucleotide
gaggggaggagaaagagcctagtgt

SEQ ID NO: 1581 - DNA, 27 bp, Artificial Sequence
  Description of Artificial Sequence: Synthetic oligonucleotide
tgctgaaagttttttgatcactcacta

SEQ ID NO: 1582 - DNA, 25 bp, Artificial Sequence
  Description of Artificial Sequence: Synthetic oligonucleotide
agaaaagaactttggttgtggtcat

SEQ ID NO: 1583 - DNA, 28 bp, Artificial Sequence
  Description of Artificial Sequence: Synthetic oligonucleotide
ccgtaatctgtattgctcattttggtct

SEQ ID NO: 1584 - DNA, 23 bp, Artificial Sequence
  Description of Artificial Sequence: Synthetic oligonucleotide
tgatcctcccacagagcctgtat

SEQ ID NO: 1585 - DNA, 26 bp, Artificial Sequence
  Description of Artificial Sequence: Synthetic oligonucleotide
ccaaggtgctatctggtcctatagct

SEQ ID NO: 1586 - DNA, 24 bp, Artificial Sequence
  Description of Artificial Sequence: Synthetic oligonucleotide
cgtgtgctctgctgttcctttaat

SEQ ID NO: 1587 - DNA, 20 bp, Artificial Sequence
  Description of Artificial Sequence: Synthetic oligonucleotide
gggctgtcacggagcgacta

SEQ ID NO: 1588 - DNA, 26 bp, Artificial Sequence
  Description of Artificial Sequence: Synthetic oligonucleotide
tcttgacctaacatttccatgtctga

SEQ ID NO: 1589 - DNA, 22 bp, Artificial Sequence
  Description of Artificial Sequence: Synthetic oligonucleotide
tacagccctatggggatgggga

SEQ ID NO: 1590 - DNA, 19 bp, Artificial Sequence
  Description of Artificial Sequence: Synthetic oligonucleotide
gcgcgcagaatgcaaagca

SEQ ID NO: 1591 - DNA, 28 bp, Artificial Sequence
  Description of Artificial Sequence: Synthetic oligonucleotide
tgaaattgaaaagttgaggcattttttt

SEQ ID NO: 1592 - DNA, 28 bp, Artificial Sequence
  Description of Artificial Sequence: Synthetic oligonucleotide
cagacaggtttctcctgaaactctttca

SEQ ID NO: 1593 - DNA, 22 bp, Artificial Sequence
  Description of Artificial Sequence: Synthetic oligonucleotide
ccgtccatcggcttctcatttt

SEQ ID NO: 1594 - DNA, 27 bp, Artificial Sequence
  Description of Artificial Sequence: Synthetic oligonucleotide
tctagaatattgcttcaaaaatgccaa

SEQ ID NO: 1595 - DNA, 24 bp, Artificial Sequence
  Description of Artificial Sequence: Synthetic oligonucleotide
taagcatggtcaattcccccttct

SEQ ID NO: 1596 - DNA, 28 bp, Artificial Sequence
  Description of Artificial Sequence: Synthetic oligonucleotide
catcccaaacccttaattatatgcatct

SEQ ID NO: 1597 - DNA, 27 bp, Artificial Sequence
  Description of Artificial Sequence: Synthetic oligonucleotide
cagcccttagcaaccactaatctgtta

SEQ ID NO: 1598 - DNA, 28 bp, Artificial Sequence
  Description of Artificial Sequence: Synthetic oligonucleotide
catgattaggtcttttcaacactgcata

SEQ ID NO: 1599 - DNA, 22 bp, Artificial Sequence
  Description of Artificial Sequence: Synthetic oligonucleotide
gatacgggtgggagctgcaaca

SEQ ID NO: 1600 - DNA, 20 bp, Artificial Sequence
  Description of Artificial Sequence: Synthetic oligonucleotide
cgcaggttcttggggcagat

SEQ ID NO: 1601 - DNA, 23 bp, Artificial Sequence
  Description of Artificial Sequence: Synthetic oligonucleotide
tgtcagagggacacaggagtcaa

SEQ ID NO: 1602 - DNA, 26 bp, Artificial Sequence
  Description of Artificial Sequence: Synthetic oligonucleotide
aaacaagcagtgttttccacaaaaat

SEQ ID NO: 1603 - DNA, 23 bp, Artificial Sequence
  Description of Artificial Sequence: Synthetic oligonucleotide
gtaacccagactgtggcaaccat

SEQ ID NO: 1604 - DNA, 23 bp, Artificial Sequence
  Description of Artificial Sequence: Synthetic oligonucleotide
ccaggtttgagggagtgagtgct

SEQ ID NO: 1605 - DNA, 27 bp, Artificial Sequence
  Description of Artificial Sequence: Synthetic oligonucleotide
ccctatcacctttgccttattccattg

SEQ ID NO: 1606 - DNA, 23 bp, Artificial Sequence
  Description of Artificial Sequence: Synthetic oligonucleotide
ggaaatgcaacatttggacagga

SEQ ID NO: 1607 - DNA, 28 bp, Artificial Sequence
  Description of Artificial Sequence: Synthetic oligonucleotide
ggaaagtttcaacaataggatccaacaa

SEQ ID NO: 1608 - DNA, 24 bp, Artificial Sequence
  Description of Artificial Sequence: Synthetic oligonucleotide
agagaagcacaagacaagaggcca

SEQ ID NO: 1609 - DNA, 23 bp, Artificial Sequence
  Description of Artificial Sequence: Synthetic oligonucleotide
tgagagtctagggaggcccacaa

SEQ ID NO: 1610 - DNA, 28 bp, Artificial Sequence
  Description of Artificial Sequence: Synthetic oligonucleotide
caaaaagcaacattcaagataacccata

SEQ ID NO: 1611 - DNA, 26 bp, Artificial Sequence
  Description of Artificial Sequence: Synthetic oligonucleotide
tctgtccatatttcattctccatcat

SEQ ID NO: 1612 - DNA, 26 bp, Artificial Sequence
  Description of Artificial Sequence: Synthetic oligonucleotide
ggaagccctgaattttgtctctgtct

SEQ ID NO: 1613 - DNA, 26 bp, Artificial Sequence
  Description of Artificial Sequence: Synthetic oligonucleotide
actcccttcttctcaagagatttcca

SEQ ID NO: 1614 - DNA, 25 bp, Artificial Sequence
  Description of Artificial Sequence: Synthetic oligonucleotide
tgactttaattcattcctgggcatt

SEQ ID NO: 1615 - DNA, 24 bp, Artificial Sequence
  Description of Artificial Sequence: Synthetic oligonucleotide
tcttggcgtctgtggtgaataatc

SEQ ID NO: 1616 - DNA, 24 bp, Artificial Sequence
  Description of Artificial Sequence: Synthetic oligonucleotide
gcaaagctcctgagtggaattcct

SEQ ID NO: 1617 - DNA, 24 bp, Artificial Sequence
  Description of Artificial Sequence: Synthetic oligonucleotide
ccagtgaggaaagatcccacctta

SEQ ID NO: 1618 - DNA, 23 bp, Artificial Sequence
  Description of Artificial Sequence: Synthetic oligonucleotide
cagcacttgggattggggttaaa

SEQ ID NO: 1619 - DNA, 20 bp, Artificial Sequence
  Description of Artificial Sequence: Synthetic oligonucleotide
gaggccaggagggctggaca

SEQ ID NO: 1620 - DNA, 24 bp, Artificial Sequence
  Description of Artificial Sequence: Synthetic oligonucleotide
gaacctgaattctgccaacaacct

SEQ ID NO: 1621 - DNA, 24 bp, Artificial Sequence
  Description of Artificial Sequence: Synthetic oligonucleotide
ataatgacatgagcgagcgccaat

SEQ ID NO: 1622 - DNA, 22 bp, Artificial Sequence
  Description of Artificial Sequence: Synthetic oligonucleotide
accccgtctgctctaccccatt

SEQ ID NO: 1623 - DNA, 24 bp, Artificial Sequence
  Description of Artificial Sequence: Synthetic oligonucleotide
aggcaggaggagaagcaagttgta

SEQ ID NO: 1624 - DNA, 24 bp, Artificial Sequence
  Description of Artificial Sequence: Synthetic oligonucleotide
gagctctcatgagaaagcccaact

SEQ ID NO: 1625 - DNA, 28 bp, Artificial Sequence
  Description of Artificial Sequence: Synthetic oligonucleotide
gaatcttgcaccttaaactcacacatca

SEQ ID NO: 1626 - DNA, 26 bp, Artificial Sequence
  Description of Artificial Sequence: Synthetic oligonucleotide
ttagtatggccactagggaaaacatt

SEQ ID NO: 1627 - DNA, 24 bp, Artificial Sequence
  Description of Artificial Sequence: Synthetic oligonucleotide
gaggagaggaggatgcacagatga

SEQ ID NO: 1628 - DNA, 28 bp, Artificial Sequence
  Description of Artificial Sequence: Synthetic oligonucleotide
gggtcacaattatttaggcaaatcactt

SEQ ID NO: 1629 - DNA, 24 bp, Artificial Sequence
  Description of Artificial Sequence: Synthetic oligonucleotide
tcatttgaaaccgtccagatcaat

SEQ ID NO: 1630 - DNA, 28 bp, Artificial Sequence
  Description of Artificial Sequence: Synthetic oligonucleotide
tgctggacttgcactaatttgtacagtt

SEQ ID NO: 1631 - DNA, 28 bp, Artificial Sequence
  Description of Artificial Sequence: Synthetic oligonucleotide
tgttattctcgtgtgatgagaatctcaa

SEQ ID NO: 1632 - DNA, 25 bp, Artificial Sequence
  Description of Artificial Sequence: Synthetic oligonucleotide
ttgggacttgtgaggtatcactcat

SEQ ID NO: 1633 - DNA, 26 bp, Artificial Sequence
  Description of Artificial Sequence: Synthetic oligonucleotide
aactccaccacaaaacatactgcatt

SEQ ID NO: 1634 - DNA, 27 bp, Artificial Sequence
  Description of Artificial Sequence: Synthetic oligonucleotide
ccataaaactgcctgtgaaagtaaaaa

SEQ ID NO: 1635 - DNA, 24 bp, Artificial Sequence
  Description of Artificial Sequence: Synthetic oligonucleotide
tcctgcttcatccagccagaatat

SEQ ID NO: 1636 - DNA, 28 bp, Artificial Sequence
  Description of Artificial Sequence: Synthetic oligonucleotide
tggtccatagattcatttctcactcact

SEQ ID NO: 1637 - DNA, 23 bp, Artificial Sequence
  Description of Artificial Sequence: Synthetic oligonucleotide
tgtgtcatcttctcatgggccaa

SEQ ID NO: 1638 - DNA, 23 bp, Artificial Sequence
  Description of Artificial Sequence: Synthetic oligonucleotide
agtgtctcatggagaggccctta

SEQ ID NO: 1639 - DNA, 22 bp, Artificial Sequence
  Description of Artificial Sequence: Synthetic oligonucleotide
ggcggggccttccagttattaa

SEQ ID NO: 1640 - DNA, 23 bp, Artificial Sequence
  Description of Artificial Sequence: Synthetic oligonucleotide
cctcctcctgcagctttgcatat

SEQ ID NO: 1641 - DNA, 25 bp, Artificial Sequence
  Description of Artificial Sequence: Synthetic oligonucleotide
gcactgtcctactcagcagcgaata

SEQ ID NO: 1642 - DNA, 27 bp, Artificial Sequence
  Description of Artificial Sequence: Synthetic oligonucleotide
ggaaaaatctactggcaatggaatctt

SEQ ID NO: 1643 - DNA, 27 bp, Artificial Sequence
  Description of Artificial Sequence: Synthetic oligonucleotide
gcaagcaggtaatgggaaagtttttaa

SEQ ID NO: 1644 - DNA, 21 bp, Artificial Sequence
  Description of Artificial Sequence: Synthetic oligonucleotide
cccactcatggccacagcttt

SEQ ID NO: 1645 - DNA, 23 bp, Artificial Sequence
  Description of Artificial Sequence: Synthetic oligonucleotide
ggggaaccacagtttcaccatca

SEQ ID NO: 1646 - DNA, 22 bp, Artificial Sequence
  Description of Artificial Sequence: Synthetic oligonucleotide
ttcagctccttgaggctgtgga

SEQ ID NO: 1647 - DNA, 21 bp, Artificial Sequence
  Description of Artificial Sequence: Synthetic oligonucleotide
gtggatcccactgtcacccca

SEQ ID NO: 1648 - DNA, 26 bp, Artificial Sequence
  Description of Artificial Sequence: Synthetic oligonucleotide
cacctaaactgagtcaagctggctaa

SEQ ID NO: 1649 - DNA, 24 bp, Artificial Sequence
  Description of Artificial Sequence: Synthetic oligonucleotide
cgtgatgttcactgtctgccaaga

SEQ ID NO: 1650 - DNA, 23 bp, Artificial Sequence
  Description of Artificial Sequence: Synthetic oligonucleotide
gctggaagtcatcgtcagcaaag

SEQ ID NO: 1651 - DNA, 23 bp, Artificial Sequence
  Description of Artificial Sequence: Synthetic oligonucleotide
gatcatctcccctgctggaaacg

SEQ ID NO: 1652 - DNA, 23 bp, Artificial Sequence
  Description of Artificial Sequence: Synthetic oligonucleotide
tccatgtcgcccacactttaaat

SEQ ID NO: 1653 - DNA, 22 bp, Artificial Sequence
  Description of Artificial Sequence: Synthetic oligonucleotide
ggagaaggtccctccaggagaa

SEQ ID NO: 1654 - DNA, 27 bp, Artificial Sequence
  Description of Artificial Sequence: Synthetic oligonucleotide
catgagacggttattttgagaaccaca

SEQ ID NO: 1655 - DNA, 28 bp, Artificial Sequence
  Description of Artificial Sequence: Synthetic oligonucleotide
gcttttacaccattgaaaagtcaaaaaa

SEQ ID NO: 1656 - DNA, 27 bp, Artificial Sequence
  Description of Artificial Sequence: Synthetic oligonucleotide
tgacaataatttgtttggctagggtaa

SEQ ID NO: 1657 - DNA, 27 bp, Artificial Sequence
  Description of Artificial Sequence: Synthetic oligonucleotide
aaacacagtgaaagaaacaggaaagaa

SEQ ID NO: 1658 - DNA, 21 bp, Artificial Sequence
  Description of Artificial Sequence: Synthetic oligonucleotide
cagggctgggggtgtgtgtat

SEQ ID NO: 1659 - DNA, 26 bp, Artificial Sequence
  Description of Artificial Sequence: Synthetic oligonucleotide
gagagtgggtgtagccttcagatgta

SEQ ID NO: 1660 - DNA, 19 bp, Artificial Sequence
  Description of Artificial Sequence: Synthetic oligonucleotide
ctcctgccgaacttcgcca

SEQ ID NO: 1661 - DNA, 28 bp, Artificial Sequence
  Description of Artificial Sequence: Synthetic oligonucleotide
gctaagtacttccaggaaactcattcat

SEQ ID NO: 1662 - DNA, 23 bp, Artificial Sequence
  Description of Artificial Sequence: Synthetic oligonucleotide
acctagctcttcctgggagggta

SEQ ID NO: 1663 - DNA, 24 bp, Artificial Sequence
  Description of Artificial Sequence: Synthetic oligonucleotide
agtcacctggccagaagggatact

SEQ ID NO: 1664 - DNA, 24 bp, Artificial Sequence
  Description of Artificial Sequence: Synthetic oligonucleotide
gggatggggaaagagaatgtgaca

SEQ ID NO: 1665 - DNA, 28 bp, Artificial Sequence
  Description of Artificial Sequence: Synthetic oligonucleotide
gaaatgtctgcaatatctagattgggaa

SEQ ID NO: 1666 - DNA, 28 bp, Artificial Sequence
  Description of Artificial Sequence: Synthetic oligonucleotide
gagagtgatgatggctacataacattgt

SEQ ID NO: 1667 - DNA, 22 bp, Artificial Sequence
  Description of Artificial Sequence: Synthetic oligonucleotide
accagccctcctctgtgggact

SEQ ID NO: 1668 - DNA, 20 bp, Artificial Sequence
  Description of Artificial Sequence: Synthetic oligonucleotide
ggatgttgtgcgctgaggga

SEQ ID NO: 1669 - DNA, 23 bp, Artificial Sequence
  Description of Artificial Sequence: Synthetic oligonucleotide
aggaaagcggaatgaaagcaggt

SEQ ID NO: 1670 - DNA, 20 bp, Artificial Sequence
  Description of Artificial Sequence: Synthetic oligonucleotide
cccaggcccaacttacccca

SEQ ID NO: 1671 - DNA, 28 bp, Artificial Sequence
  Description of Artificial Sequence: Synthetic oligonucleotide
tcttcacatcctgaagttggtactcttc

SEQ ID NO: 1672 - DNA, 22 bp, Artificial Sequence
  Description of Artificial Sequence: Synthetic oligonucleotide
aaaccaagggcaggatcaggaa

SEQ ID NO: 1673 - DNA, 26 bp, Artificial Sequence
  Description of Artificial Sequence: Synthetic oligonucleotide
ttttaattccaggaaataaatgccca

SEQ ID NO: 1674 - DNA, 28 bp, Artificial Sequence
  Description of Artificial Sequence: Synthetic oligonucleotide
agaagagtagagtgggcccttatgtact

SEQ ID NO: 1675 - DNA, 27 bp, Artificial Sequence
  Description of Artificial Sequence: Synthetic oligonucleotide
tggaaattaaatttttagccactcaat

SEQ ID NO: 1676 - DNA, 20 bp, Artificial Sequence
  Description of Artificial Sequence: Synthetic oligonucleotide
cagtggctcgtctccaccca

SEQ ID NO: 1677 - DNA, 25 bp, Artificial Sequence
  Description of Artificial Sequence: Synthetic oligonucleotide
tgaaaccatcaaggcaatgtgatat

SEQ ID NO: 1678 - DNA, 27 bp, Artificial Sequence
  Description of Artificial Sequence: Synthetic oligonucleotide
ggtggtgggttttaatgaacattttct

SEQ ID NO: 1679 - DNA, 27 bp, Artificial Sequence
  Description of Artificial Sequence: Synthetic oligonucleotide
acatatcgttttaccacaatttcacca

SEQ ID NO: 1680 - DNA, 21 bp, Artificial Sequence
  Description of Artificial Sequence: Synthetic oligonucleotide
cctgctgcctccccaaactct

SEQ ID NO: 1681 - DNA, 22 bp, Artificial Sequence
  Description of Artificial Sequence: Synthetic oligonucleotide
ggggtacatatgggagcctgga

SEQ ID NO: 1682 - DNA, 27 bp, Artificial Sequence
  Description of Artificial Sequence: Synthetic oligonucleotide
acatgcacagtatttgaaatctgtgta

SEQ ID NO: 1683 - DNA, 21 bp, Artificial Sequence
  Description of Artificial Sequence: Synthetic oligonucleotide
ccagctccatcccgtcaatga

SEQ ID NO: 1684 - DNA, 20 bp, Artificial Sequence
  Description of Artificial Sequence: Synthetic oligonucleotide
gccctgatggccactgagct

SEQ ID NO: 1685 - DNA, 27 bp, Artificial Sequence
  Description of Artificial Sequence: Synthetic oligonucleotide
gtttggatacaaaggacaggagactat

SEQ ID NO: 1686 - DNA, 28 bp, Artificial Sequence
  Description of Artificial Sequence: Synthetic oligonucleotide
gaactttatgaaattattcctgcctcaa

SEQ ID NO: 1687 - DNA, 24 bp, Artificial Sequence
  Description of Artificial Sequence: Synthetic oligonucleotide
aattcaggcactttgcattcctca

SEQ ID NO: 1688 - DNA, 24 bp, Artificial Sequence
  Description of Artificial Sequence: Synthetic oligonucleotide
tggctttacaaggaatgggcagtt

SEQ ID NO: 1689 - DNA, 23 bp, Artificial Sequence
  Description of Artificial Sequence: Synthetic oligonucleotide
gagtccaggttgactgatggggt

SEQ ID NO: 1690 - DNA, 27 bp, Artificial Sequence
  Description of Artificial Sequence: Synthetic oligonucleotide
agtaggaaggaatctatgtcggactca

SEQ ID NO: 1691 - DNA, 24 bp, Artificial Sequence
  Description of Artificial Sequence: Synthetic oligonucleotide
ctaggggccagcagtttaggagta

SEQ ID NO: 1692 - DNA, 23 bp, Artificial Sequence
  Description of Artificial Sequence: Synthetic oligonucleotide
tggggttgaaaagaggagaccca

SEQ ID NO: 1693 - DNA, 18 bp, Artificial Sequence
  Description of Artificial Sequence: Synthetic oligonucleotide
cctgccaattgcctgcgg

SEQ ID NO: 1694 - DNA, 28 bp, Artificial Sequence
  Description of Artificial Sequence: Synthetic oligonucleotide
tcattatccccagttcaatgactttaat

SEQ ID NO: 1695 - DNA, 29 bp, Artificial Sequence
  Description of Artificial Sequence: Synthetic oligonucleotide
tggtcaggatataaaatggtacaactgct

SEQ ID NO: 1696 - DNA, 22 bp, Artificial Sequence
  Description of Artificial Sequence: Synthetic oligonucleotide
attcctgtgaacccccagtcct

SEQ ID NO: 1697 - DNA, 22 bp, Artificial Sequence
  Description of Artificial Sequence: Synthetic oligonucleotide
cccgctcctgagtatctccccg

SEQ ID NO: 1698 - DNA, 24 bp, Artificial Sequence
  Description of Artificial Sequence: Synthetic oligonucleotide
aaccctgtgatcttcaatgagcct

SEQ ID NO: 1699 - DNA, 23 bp, Artificial Sequence
  Description of Artificial Sequence: Synthetic oligonucleotide
cctctctttccctcctccccact

SEQ ID NO: 1700 - DNA, 20 bp, Artificial Sequence
  Description of Artificial Sequence: Synthetic oligonucleotide
atggcaggaagggtggggga

SEQ ID NO: 1701 - DNA, 28 bp, Artificial Sequence
  Description of Artificial Sequence: Synthetic oligonucleotide
ccggtaagaatttagcaagtgatgaaat

SEQ ID NO: 1702 - DNA, 20 bp, Artificial Sequence
  Description of Artificial Sequence: Synthetic oligonucleotide
cttgtccctccccaccccca

SEQ ID NO: 1703 - DNA, 29 bp, Artificial Sequence
  Description of Artificial Sequence: Synthetic oligonucleotide
cctcctccactgttatgtgtaactatcaa

SEQ ID NO: 1704 - DNA, 21 bp, Artificial Sequence
  Description of Artificial Sequence: Synthetic oligonucleotide
cgggacaaatccacacccatt

SEQ ID NO: 1705 - DNA, 23 bp, Artificial Sequence
  Description of Artificial Sequence: Synthetic oligonucleotide
gagcaagtggtttgtccaaggct

SEQ ID NO: 1706 - DNA, 20 bp, Artificial Sequence
  Description of Artificial Sequence: Synthetic oligonucleotide
aggcggtgtctggggttgga

SEQ ID NO: 1707 - DNA, 23 bp, Artificial Sequence
  Description of Artificial Sequence: Synthetic oligonucleotide
agcacctgcaagaaaaagggtga

SEQ ID NO: 1708 - DNA, 19 bp, Artificial Sequence
  Description of Artificial Sequence: Synthetic oligonucleotide
ccatatgaggctgccggca

SEQ ID NO: 1709 - DNA, 22 bp, Artificial Sequence
  Description of Artificial Sequence: Synthetic oligonucleotide
actcatcctggaggcagctgca

SEQ ID NO: 1710 - DNA, 23 bp, Artificial Sequence
  Description of Artificial Sequence: Synthetic oligonucleotide
ccaccaccctctcactcctgaat

SEQ ID NO: 1711 - DNA, 24 bp, Artificial Sequence
  Description of Artificial Sequence: Synthetic oligonucleotide
ccccagtccaaagtgttttctgct

SEQ ID NO: 1712 - DNA, 22 bp, Artificial Sequence
  Description of Artificial Sequence: Synthetic oligonucleotide
aggacccacacctgctttcctt

SEQ ID NO: 1713 - DNA, 21 bp, Artificial Sequence
  Description of Artificial Sequence: Synthetic oligonucleotide
acacagcagagctgcctgcag

SEQ ID NO: 1714 - DNA, 29 bp, Artificial Sequence
  Description of Artificial Sequence: Synthetic oligonucleotide
gggaaatgcaacagagaattaaataaagt

SEQ ID NO: 1715 - DNA, 22 bp, Artificial Sequence
  Description of Artificial Sequence: Synthetic oligonucleotide
gagcatcaaactctggggggaa

SEQ ID NO: 1716 - DNA, 22 bp, Artificial Sequence
  Description of Artificial Sequence: Synthetic oligonucleotide
ggcaaacagcacaccagaacca

SEQ ID NO: 1717 - DNA, 22 bp, Artificial Sequence
  Description of Artificial Sequence: Synthetic oligonucleotide
acctgctcctcccacctgatca

SEQ ID NO: 1718 - DNA, 25 bp, Artificial Sequence
  Description of Artificial Sequence: Synthetic oligonucleotide
gaaaacaaaggccgcagattaaaat

SEQ ID NO: 1719 - DNA, 28 bp, Artificial Sequence
  Description of Artificial Sequence: Synthetic oligonucleotide
gaatgttgtttagccaacttctctgtat

SEQ ID NO: 1720 - DNA, 29 bp, Artificial Sequence
  Description of Artificial Sequence: Synthetic oligonucleotide
ccaatctctgttactctcacgtaatcctc

SEQ ID NO: 1721 - DNA, 24 bp, Artificial Sequence
  Description of Artificial Sequence: Synthetic oligonucleotide
tggtgatgtcaaatggtgacgaga

SEQ ID NO: 1722 - DNA, 22 bp, Artificial Sequence
  Description of Artificial Sequence: Synthetic oligonucleotide
ggggcttcctctccttcgactt

SEQ ID NO: 1723 - DNA, 22 bp, Artificial Sequence
  Description of Artificial Sequence: Synthetic oligonucleotide
cagcagctccagttcccaatcg

SEQ ID NO: 1724 - DNA, 23 bp, Artificial Sequence
  Description of Artificial Sequence: Synthetic oligonucleotide
gccataaattcttgcacctggga

SEQ ID NO: 1725 - DNA, 28 bp, Artificial Sequence
  Description of Artificial Sequence: Synthetic oligonucleotide
tcatatgagaatgtctctgttctgtcaa

SEQ ID NO: 1726 - DNA, 22 bp, Artificial Sequence
  Description of Artificial Sequence: Synthetic oligonucleotide
gatggaaacctggtcccaacat

SEQ ID NO: 1727 - DNA, 23 bp, Artificial Sequence
  Description of Artificial Sequence: Synthetic oligonucleotide
gttagggcttcactggccacatt

SEQ ID NO: 1728 - DNA, 25 bp, Artificial Sequence
  Description of Artificial Sequence: Synthetic oligonucleotide
tatcaatcatcctcccaccctccct

SEQ ID NO: 1729 - DNA, 20 bp, Artificial Sequence
  Description of Artificial Sequence: Synthetic oligonucleotide
catgcacccagcacaatggt

SEQ ID NO: 1730 - DNA, 28 bp, Artificial Sequence
  Description of Artificial Sequence: Synthetic oligonucleotide
gatggactgtttcctggctctatataca

SEQ ID NO: 1731 - DNA, 22 bp, Artificial Sequence
  Description of Artificial Sequence: Synthetic oligonucleotide
tccaatcacctcccatgaggtt

SEQ ID NO: 1732 - DNA, 27 bp, Artificial Sequence
  Description of Artificial Sequence: Synthetic oligonucleotide
aaaattttgtttcttgtccctttcttc

SEQ ID NO: 1733 - DNA, 20 bp, Artificial Sequence
  Description of Artificial Sequence: Synthetic oligonucleotide
agggccagagaccagctcca

SEQ ID NO: 1734 - DNA, 27 bp, Artificial Sequence
  Description of Artificial Sequence: Synthetic oligonucleotide
tgttaccaatggcagaatttccttctt

SEQ ID NO: 1735 - DNA, 22 bp, Artificial Sequence
  Description of Artificial Sequence: Synthetic oligonucleotide
gcagccctctgtgaccacaagt

SEQ ID NO: 1736 - DNA, 22 bp, Artificial Sequence
  Description of Artificial Sequence: Synthetic oligonucleotide
cgccctccaggatccaatagga

SEQ ID NO: 1737 - DNA, 28 bp, Artificial Sequence
  Description of Artificial Sequence: Synthetic oligonucleotide
gcaaccattgatactaattgcttaggtt

SEQ ID NO: 1738 - DNA, 26 bp, Artificial Sequence
  Description of Artificial Sequence: Synthetic oligonucleotide
tgggtctccttgttatcttctttcat

SEQ ID NO: 1739 - DNA, 23 bp, Artificial Sequence
  Description of Artificial Sequence: Synthetic oligonucleotide
ggaaggtcaatacctgagccgtg

SEQ ID NO: 1740 - DNA, 25 bp, Artificial Sequence
  Description of Artificial Sequence: Synthetic oligonucleotide
cctctgccttcttcacacccattat

SEQ ID NO: 1741 - DNA, 23 bp, Artificial Sequence
  Description of Artificial Sequence: Synthetic oligonucleotide
ctgacctaggtctgtctgcccca

SEQ ID NO: 1742 - DNA, 21 bp, Artificial Sequence
  Description of Artificial Sequence: Synthetic oligonucleotide
gccccgtggctaacagagcta

SEQ ID NO: 1743 - DNA, 21 bp, Artificial Sequence
  Description of Artificial Sequence: Synthetic oligonucleotide
agtgctggaggctgactggca

SEQ ID NO: 1744 - DNA, 21 bp, Artificial Sequence
  Description of Artificial Sequence: Synthetic oligonucleotide
cggagtgcaagggtggaaact

SEQ ID NO: 1745 - DNA, 20 bp, Artificial Sequence
  Description of Artificial Sequence: Synthetic oligonucleotide
ggtggagacgagccactgga

SEQ ID NO: 1746 - DNA, 23 bp, Artificial Sequence
  Description of Artificial Sequence: Synthetic oligonucleotide
tggggcccacaaggaattatctt

SEQ ID NO: 1747 - DNA, 22 bp, Artificial Sequence
  Description of Artificial Sequence: Synthetic oligonucleotide
atcaggtagtctgaggccgcct

SEQ ID NO: 1748 - DNA, 27 bp, Artificial Sequence
  Description of Artificial Sequence: Synthetic oligonucleotide
tttcttctgagttttcactagctgcaa

SEQ ID NO: 1749 - DNA, 26 bp, Artificial Sequence
  Description of Artificial Sequence: Synthetic oligonucleotide
tgaaaacatctgacccttgagtttta

SEQ ID NO: 1750 - DNA, 21 bp, Artificial Sequence
  Description of Artificial Sequence: Synthetic oligonucleotide
gagttttggtggggacattca

SEQ ID NO: 1751 - DNA, 23 bp, Artificial Sequence
  Description of Artificial Sequence: Synthetic oligonucleotide
cattgtgagtccattgcttgcac

SEQ ID NO: 1752 - DNA, 23 bp, Artificial Sequence
  Description of Artificial Sequence: Synthetic oligonucleotide
gagcctggagcaagtgcctaagt

SEQ ID NO: 1753 - DNA, 24 bp, Artificial Sequence
  Description of Artificial Sequence: Synthetic oligonucleotide
tccaccatggtctcaaaggctaca

SEQ ID NO: 1754 - DNA, 23 bp, Artificial Sequence
  Description of Artificial Sequence: Synthetic oligonucleotide
cttgtgtgcttgctgggatcata

SEQ ID NO: 1755 - DNA, 19 bp, Artificial Sequence
  Description of Artificial Sequence: Synthetic oligonucleotide
ctgccaaggcagggtggct

SEQ ID NO: 1756 - DNA, 23 bp, Artificial Sequence
  Description of Artificial Sequence: Synthetic oligonucleotide
ttcctctaaggcccagtcaccaa

SEQ ID NO: 1757 - DNA, 30 bp, Artificial Sequence
  Description of Artificial Sequence: Synthetic oligonucleotide
ggaaagctataggctaatctcactgacaaa

SEQ ID NO: 1758 - DNA, 24 bp, Artificial Sequence
  Description of Artificial Sequence: Synthetic oligonucleotide
gctttggttgccaccactaactca

SEQ ID NO: 1759 - DNA, 22 bp, Artificial Sequence
  Description of Artificial Sequence: Synthetic oligonucleotide
cagccctatagccaccccaaga

SEQ ID NO: 1760 - DNA, 22 bp, Artificial Sequence
  Description of Artificial Sequence: Synthetic oligonucleotide
aacccaagggctattcctgcat

SEQ ID NO: 1761 - DNA, 22 bp, Artificial Sequence
  Description of Artificial Sequence: Synthetic oligonucleotide
tttggacttcggacacctccat

SEQ ID NO: 1762 - DNA, 22 bp, Artificial Sequence
  Description of Artificial Sequence: Synthetic oligonucleotide
accctcaaaccccagctgactt

SEQ ID NO: 1763 - DNA, 24 bp, Artificial Sequence
  Description of Artificial Sequence: Synthetic oligonucleotide
taagaggcaaggatgaggctgaga

SEQ ID NO: 1764 - DNA, 22 bp, Artificial Sequence
  Description of Artificial Sequence: Synthetic oligonucleotide
gagggactagggtgtccccaaa

SEQ ID NO: 1765 - DNA, 18 bp, Artificial Sequence
  Description of Artificial Sequence: Synthetic oligonucleotide
ccccaggacccctggcaa

SEQ ID NO: 1766 - DNA, 23 bp, Artificial Sequence
  Description of Artificial Sequence: Synthetic oligonucleotide
agcggagtgtaaggccaagtgaa

SEQ ID NO: 1767 - DNA, 23 bp, Artificial Sequence
  Description of Artificial Sequence: Synthetic oligonucleotide
cagaggaggagcccaacagaata

SEQ ID NO: 1768 - DNA, 21 bp, Artificial Sequence
  Description of Artificial Sequence: Synthetic oligonucleotide
tttcaccatgggtcagcccac

SEQ ID NO: 1769 - DNA, 21 bp, Artificial Sequence
  Description of Artificial Sequence: Synthetic oligonucleotide
tggaaagcaagcacatatgca

SEQ ID NO: 1770 - DNA, 22 bp, Artificial Sequence
  Description of Artificial Sequence: Synthetic oligonucleotide
ccagggggaagagcaaaggact

SEQ ID NO: 1771 - DNA, 23 bp, Artificial Sequence
  Description of Artificial Sequence: Synthetic oligonucleotide
ctgtgggtgcatttgatgtgact

SEQ ID NO: 1772 - DNA, 29 bp, Artificial Sequence
  Description of Artificial Sequence: Synthetic oligonucleotide
cacttcagttgcaaaagtcctatttctta

SEQ ID NO: 1773 - DNA, 20 bp, Artificial Sequence
  Description of Artificial Sequence: Synthetic oligonucleotide
cattccgccctgctaagcct

SEQ ID NO: 1774 - DNA, 23 bp, Artificial Sequence
  Description of Artificial Sequence: Synthetic oligonucleotide
ttctgggtccacacgatgtttta

SEQ ID NO: 1775 - DNA, 22 bp, Artificial Sequence
  Description of Artificial Sequence: Synthetic oligonucleotide
ggagcgacagaagcttctggaa

SEQ ID NO: 1776 - DNA, 20 bp, Artificial Sequence
  Description of Artificial Sequence: Synthetic oligonucleotide
ggggagggaggacccaaagt

SEQ ID NO: 1777 - DNA, 24 bp, Artificial Sequence
  Description of Artificial Sequence: Synthetic oligonucleotide
tcagcctttccatctttgctgtcc

SEQ ID NO: 1778 - DNA, 23 bp, Artificial Sequence
  Description of Artificial Sequence: Synthetic oligonucleotide
taaaaaagaaaggcaggtccgga

SEQ ID NO: 1779 - DNA, 23 bp, Artificial Sequence
  Description of Artificial Sequence: Synthetic oligonucleotide
tcataaaggcatgaggtgggaca

SEQ ID NO: 1780 - DNA, 22 bp, Artificial Sequence
  Description of Artificial Sequence: Synthetic oligonucleotide
gcctccactcaggtcagaacca

SEQ ID NO: 1781 - DNA, 28 bp, Artificial Sequence
  Description of Artificial Sequence: Synthetic oligonucleotide
accatagtaggaaacctggatagagaca

SEQ ID NO: 1782 - DNA, 24 bp, Artificial Sequence
  Description of Artificial Sequence: Synthetic oligonucleotide
ctatggactgaattgtgtccccct

SEQ ID NO: 1783 - DNA, 19 bp, Artificial Sequence
  Description of Artificial Sequence: Synthetic oligonucleotide
agggagggggtgggacaga

SEQ ID NO: 1784 - DNA, 23 bp, Artificial Sequence
  Description of Artificial Sequence: Synthetic oligonucleotide
ctttggggtagctccctctcaga

SEQ ID NO: 1785 - DNA, 18 bp, Artificial Sequence
  Description of Artificial Sequence: Synthetic oligonucleotide
gaggccagctggggcaag

SEQ ID NO: 1786 - DNA, 22 bp, Artificial Sequence
  Description of Artificial Sequence: Synthetic oligonucleotide
cggttcctctccaaacctggtt

SEQ ID NO: 1787 - DNA, 29 bp, Artificial Sequence
  Description of Artificial Sequence: Synthetic oligonucleotide
gctgtaagtcactaaatttgggggtagtt

SEQ ID NO: 1788 - DNA, 27 bp, Artificial Sequence
  Description of Artificial Sequence: Synthetic oligonucleotide
gaatattctccaatcttgaaaatggct

SEQ ID NO: 1789 - DNA, 29 bp, Artificial Sequence
  Description of Artificial Sequence: Synthetic oligonucleotide
ggggcatcaataattaatgcttatttatt

SEQ ID NO: 1790 - DNA, 26 bp, Artificial Sequence
  Description of Artificial Sequence: Synthetic oligonucleotide
aattctcaggggaaattttttaccca

SEQ ID NO: 1791 - DNA, 24 bp, Artificial Sequence
  Description of Artificial Sequence: Synthetic oligonucleotide
gttactcatcccagaagcacccat

SEQ ID NO: 1792 - DNA, 21 bp, Artificial Sequence
  Description of Artificial Sequence: Synthetic oligonucleotide
gtagaggcagagggggctgga

SEQ ID NO: 1793 - DNA, 21 bp, Artificial Sequence
  Description of Artificial Sequence: Synthetic oligonucleotide
aacagaatccaaaggccggca

SEQ ID NO: 1794 - DNA, 20 bp, Artificial Sequence
  Description of Artificial Sequence: Synthetic oligonucleotide
ggccccctctcgtttgagga

SEQ ID NO: 1795 - DNA, 23 bp, Artificial Sequence
  Description of Artificial Sequence: Synthetic oligonucleotide
tgattgcctgtccagctgttgaa

SEQ ID NO: 1796 - DNA, 23 bp, Artificial Sequence
  Description of Artificial Sequence: Synthetic oligonucleotide
actgcgctaaggaggcaactgtc

SEQ ID NO: 1797 - DNA, 24 bp, Artificial Sequence
  Description of Artificial Sequence: Synthetic oligonucleotide
ggaaaatgggaccaacgctaaaat

SEQ ID NO: 1798 - DNA, 22 bp, Artificial Sequence
  Description of Artificial Sequence: Synthetic oligonucleotide
gcactcctttcccaccgttttt

SEQ ID NO: 1799 - DNA, 28 bp, Artificial Sequence
  Description of Artificial Sequence: Synthetic oligonucleotide
cagtgacaaaacaggaagaacaaaaaaa

SEQ ID NO: 1800 - DNA, 28 bp, Artificial Sequence
  Description of Artificial Sequence: Synthetic oligonucleotide
tcttcatgctatttattactgtctgcaa

SEQ ID NO: 1801 - DNA, 22 bp, Artificial Sequence
  Description of Artificial Sequence: Synthetic oligonucleotide
gtgagtggtgggcacaggacac

SEQ ID NO: 1802 - DNA, 25 bp, Artificial Sequence
  Description of Artificial Sequence: Synthetic oligonucleotide
cagggaaagctgagtcatgattcta

SEQ ID NO: 1803 - DNA, 25 bp, Artificial Sequence
  Description of Artificial Sequence: Synthetic oligonucleotide
aacctttggaggaatggtcagacta

SEQ ID NO: 1804 - DNA, 28 bp, Artificial Sequence
  Description of Artificial Sequence: Synthetic oligonucleotide
gcagctactggaatgaattagagtttat

SEQ ID NO: 1805 - DNA, 24 bp, Artificial Sequence
  Description of Artificial Sequence: Synthetic oligonucleotide
ttctgccaaaatgaagccaacata

SEQ ID NO: 1806 - DNA, 21 bp, Artificial Sequence
  Description of Artificial Sequence: Synthetic oligonucleotide
gtgaccagggccctgaactct

SEQ ID NO: 1807 - DNA, 21 bp, Artificial Sequence
  Description of Artificial Sequence: Synthetic oligonucleotide
agcacagtccccaggcctcaa

SEQ ID NO: 1808 - DNA, 30 bp, Artificial Sequence
  Description of Artificial Sequence: Synthetic oligonucleotide
tccttcttgctgagtaatgttctagtttta

SEQ ID NO: 1809 - DNA, 23 bp, Artificial Sequence
  Description of Artificial Sequence: Synthetic oligonucleotide
tgttctgctcctgcagaggtcat

SEQ ID NO: 1810 - DNA, 22 bp, Artificial Sequence
  Description of Artificial Sequence: Synthetic oligonucleotide
ggcttactttccccacggagct

SEQ ID NO: 1811 - DNA, 23 bp, Artificial Sequence
  Description of Artificial Sequence: Synthetic oligonucleotide
cagaaagacgcagaggaggtgga

SEQ ID NO: 1812 - DNA, 22 bp, Artificial Sequence
  Description of Artificial Sequence: Synthetic oligonucleotide
ccaagggctcaccattgacagt

SEQ ID NO: 1813 - DNA, 21 bp, Artificial Sequence
  Description of Artificial Sequence: Synthetic oligonucleotide
gaaaatggggatggggtgaaa

SEQ ID NO: 1814 - DNA, 21 bp, Artificial Sequence
  Description of Artificial Sequence: Synthetic oligonucleotide
ccttcatggccatagccacaa

SEQ ID NO: 1815 - DNA, 20 bp, Artificial Sequence
  Description of Artificial Sequence: Synthetic oligonucleotide
gcctaccgagtgttggccac

SEQ ID NO: 1816 - DNA, 22 bp, Artificial Sequence
  Description of Artificial Sequence: Synthetic oligonucleotide
agctcaaggctcagggccttta

SEQ ID NO: 1817 - DNA, 28 bp, Artificial Sequence
  Description of Artificial Sequence: Synthetic oligonucleotide
cacaatattcagtattttggcaggataa

SEQ ID NO: 1818 - DNA, 26 bp, Artificial Sequence
  Description of Artificial Sequence: Synthetic oligonucleotide
ttgagtgctatttctttgtggcatca

SEQ ID NO: 1819 - DNA, 23 bp, Artificial Sequence
  Description of Artificial Sequence: Synthetic oligonucleotide
caggcaaggactgcagctagaca

SEQ ID NO: 1820 - DNA, 21 bp, Artificial Sequence
  Description of Artificial Sequence: Synthetic oligonucleotide
gggcaggatctggatgggaca

SEQ ID NO: 1821 - DNA, 25 bp, Artificial Sequence
  Description of Artificial Sequence: Synthetic oligonucleotide
gcttacagctcaggaatccaccaat

SEQ ID NO: 1822 - DNA, 23 bp, Artificial Sequence
  Description of Artificial Sequence: Synthetic oligonucleotide
accaggtgtgccctcatatgctt

SEQ ID NO: 1823 - DNA, 29 bp, Artificial Sequence
  Description of Artificial Sequence: Synthetic oligonucleotide
tgacattgcactgtaataataaaggtgta

SEQ ID NO: 1824 - DNA, 22 bp, Artificial Sequence
  Description of Artificial Sequence: Synthetic oligonucleotide
aacctcatcccaccttggcaat

SEQ ID NO: 1825 - DNA, 27 bp, Artificial Sequence
  Description of Artificial Sequence: Synthetic oligonucleotide
ccttcaggactcacatcttagtcacag

SEQ ID NO: 1826 - DNA, 23 bp, Artificial Sequence
  Description of Artificial Sequence: Synthetic oligonucleotide
aggatagccctgctaggcaagga

SEQ ID NO: 1827 - DNA, 23 bp, Artificial Sequence
  Description of Artificial Sequence: Synthetic oligonucleotide
agcctccctttcccaggcttatt

SEQ ID NO: 1828 - DNA, 25 bp, Artificial Sequence
  Description of Artificial Sequence: Synthetic oligonucleotide
aaatagctcagagaatgccaatggt

SEQ ID NO: 1829 - DNA, 18 bp, Artificial Sequence
  Description of Artificial Sequence: Synthetic oligonucleotide
cctccccccaccaaggat

SEQ ID NO: 1830 - DNA, 22 bp, Artificial Sequence
  Description of Artificial Sequence: Synthetic oligonucleotide
gggcgacttttcccccttaaaa

SEQ ID NO: 1831 - DNA, 22 bp, Artificial Sequence
  Description of Artificial Sequence: Synthetic oligonucleotide
catcagccccaacaccagagaa

SEQ ID NO: 1832 - DNA, 27 bp, Artificial Sequence
  Description of Artificial Sequence: Synthetic oligonucleotide
gtttttttcaaaaactggctatttgat

SEQ ID NO: 1833 - DNA, 20 bp, Artificial Sequence
  Description of Artificial Sequence: Synthetic oligonucleotide
gcagtgtcgacctcctgggt

SEQ ID NO: 1834 - DNA, 20 bp, Artificial Sequence
  Description of Artificial Sequence: Synthetic oligonucleotide
gacgcacgaacccctccctt

SEQ ID NO: 1835 - DNA, 30 bp, Artificial Sequence
  Description of Artificial Sequence: Synthetic oligonucleotide
gcaactgctatactacagtagtcaacctga

SEQ ID NO: 1836 - DNA, 19 bp, Artificial Sequence
  Description of Artificial Sequence: Synthetic oligonucleotide
acccagggtcctcgccccg

SEQ ID NO: 1837 - DNA, 23 bp, Artificial Sequence
  Description of Artificial Sequence: Synthetic oligonucleotide
catagcacagggagggtttccct

SEQ ID NO: 1838 - DNA, 29 bp, Artificial Sequence
  Description of Artificial Sequence: Synthetic oligonucleotide
ggcagaatcactctccaaaaagacttacg

SEQ ID NO: 1839 - DNA, 25 bp, Artificial Sequence
  Description of Artificial Sequence: Synthetic oligonucleotide
aagacgaggcaaagacacctagaat

SEQ ID NO: 1840 - DNA, 21 bp, Artificial Sequence
  Description of Artificial Sequence: Synthetic oligonucleotide
ctgccaggcaagctacagcct

SEQ ID NO: 1841 - DNA, 28 bp, Artificial Sequence
  Description of Artificial Sequence: Synthetic oligonucleotide
tgcaacgtagaaaggcttgattataaat

SEQ ID NO: 1842 - DNA, 22 bp, Artificial Sequence
  Description of Artificial Sequence: Synthetic oligonucleotide
caaagggctaggctcacaccct

SEQ ID NO: 1843 - DNA, 18 bp, Artificial Sequence
  Description of Artificial Sequence: Synthetic oligonucleotide
cgcggtaaggctggggta

SEQ ID NO: 1844 - DNA, 30 bp, Artificial Sequence
  Description of Artificial Sequence: Synthetic oligonucleotide
cccaatatgcaattaacaaagaagataaca

SEQ ID NO: 1845 - DNA, 25 bp, Artificial Sequence
  Description of Artificial Sequence: Synthetic oligonucleotide
tccctgccccaatacctaaaaagta

SEQ ID NO: 1846 - DNA, 18 bp, Artificial Sequence
  Description of Artificial Sequence: Synthetic oligonucleotide
ccccgcaccccacaggat

SEQ ID NO: 1847 - DNA, 21 bp, Artificial Sequence
  Description of Artificial Sequence: Synthetic oligonucleotide
ctgcctcgggagttctgacca

SEQ ID NO: 1848 - DNA, 22 bp, Artificial Sequence
  Description of Artificial Sequence: Synthetic oligonucleotide
cgcacagattttccgagtgaat

SEQ ID NO: 1849 - DNA, 22 bp, Artificial Sequence
  Description of Artificial Sequence: Synthetic oligonucleotide
ggaggctcatccatcagctgct

SEQ ID NO: 1850 - DNA, 24 bp, Artificial Sequence
  Description of Artificial Sequence: Synthetic oligonucleotide
cctcccatcctccaaaacttcctt

SEQ ID NO: 1851 - DNA, 26 bp, Artificial Sequence
  Description of Artificial Sequence: Synthetic oligonucleotide
ttgttggaaaattgcaagttgtatga

SEQ ID NO: 1852 - DNA, 23 bp, Artificial Sequence
  Description of Artificial Sequence: Synthetic oligonucleotide
caccttcctcagagcccaccttt

SEQ ID NO: 1853 - DNA, 23 bp, Artificial Sequence
  Description of Artificial Sequence: Synthetic oligonucleotide
agtgctgaacatcacgtggctgt

SEQ ID NO: 1854 - DNA, 18 bp, Artificial Sequence
  Description of Artificial Sequence: Synthetic oligonucleotide
gcccccgcaaatcaccca

SEQ ID NO: 1855 - DNA, 21 bp, Artificial Sequence
  Description of Artificial Sequence: Synthetic oligonucleotide
agtccctgcctgtgtccccca

SEQ ID NO: 1856 - DNA, 29 bp, Artificial Sequence
  Description of Artificial Sequence: Synthetic oligonucleotide
tttcttggatataacaccaaagatacaaa

SEQ ID NO: 1857 - DNA, 22 bp, Artificial Sequence
  Description of Artificial Sequence: Synthetic oligonucleotide
gtcacccacaggtttcccaggt

SEQ ID NO: 1858 - DNA, 19 bp, Artificial Sequence
  Description of Artificial Sequence: Synthetic oligonucleotide
gggggccacaggaaaggct

SEQ ID NO: 1859 - DNA, 22 bp, Artificial Sequence
  Description of Artificial Sequence: Synthetic oligonucleotide
ggctgggttgctggatgattct

SEQ ID NO: 1860 - DNA, 21 bp, Artificial Sequence
  Description of Artificial Sequence: Synthetic oligonucleotide
cctccctgggcctcagtttct

SEQ ID NO: 1861 - DNA, 19 bp, Artificial Sequence
  Description of Artificial Sequence: Synthetic oligonucleotide
gccttggcatgctccctct

SEQ ID NO: 1862 - DNA, 19 bp, Artificial Sequence
  Description of Artificial Sequence: Synthetic oligonucleotide
cctcccagccacagctcgt

SEQ ID NO: 1863 - DNA, 20 bp, Artificial Sequence
  Description of Artificial Sequence: Synthetic oligonucleotide
ccctgccgctttctgtgact

SEQ ID NO: 1864 - DNA, 27 bp, Artificial Sequence
  Description of Artificial Sequence: Synthetic oligonucleotide
ttcaaaatagttgacagctggtatggt

SEQ ID NO: 1865 - DNA, 19 bp, Artificial Sequence
  Description of Artificial Sequence: Synthetic oligonucleotide
gtgggcactggggggaagt

SEQ ID NO: 1866 - DNA, 30 bp, Artificial Sequence
  Description of Artificial Sequence: Synthetic oligonucleotide
ccataaagaagctctgtcaatttttagctt

SEQ ID NO: 1867 - DNA, 20 bp, Artificial Sequence
  Description of Artificial Sequence: Synthetic oligonucleotide
gaggaaaggcgctctggcct

SEQ ID NO: 1868 - DNA, 19 bp, Artificial Sequence
  Description of Artificial Sequence: Synthetic oligonucleotide
ctcctggtgggcgaccgtg

SEQ ID NO: 1869 - DNA, 28 bp, Artificial Sequence
  Description of Artificial Sequence: Synthetic oligonucleotide
tcagtgagcacatttacttccaagagtt

SEQ ID NO: 1870 - DNA, 23 bp, Artificial Sequence
  Description of Artificial Sequence: Synthetic oligonucleotide
caaagccggttttgctcactgtt

SEQ ID NO: 1871 - DNA, 27 bp, Artificial Sequence
  Description of Artificial Sequence: Synthetic oligonucleotide
cctcttggtaaagtcagctgtaggagt

SEQ ID NO: 1872 - DNA, 22 bp, Artificial Sequence
  Description of Artificial Sequence: Synthetic oligonucleotide
gcggggtctgggttttcttgtt

SEQ ID NO: 1873 - DNA, 28 bp, Artificial Sequence
  Description of Artificial Sequence: Synthetic oligonucleotide
aaatagaaaaacaatcaattgggaaaaa

SEQ ID NO: 1874 - DNA, 21 bp, Artificial Sequence
  Description of Artificial Sequence: Synthetic oligonucleotide
ggtcatcccaagggcttccaa

SEQ ID NO: 1875 - DNA, 21 bp, Artificial Sequence
  Description of Artificial Sequence: Synthetic oligonucleotide
ctgtccctggggctggagaca

SEQ ID NO: 1876 - DNA, 19 bp, Artificial Sequence
  Description of Artificial Sequence: Synthetic oligonucleotide
gggaggcctacctggggct

SEQ ID NO: 1877 - DNA, 22 bp, Artificial Sequence
  Description of Artificial Sequence: Synthetic oligonucleotide
ctggatgtgctcgaaggtccat

SEQ ID NO: 1878 - DNA, 22 bp, Artificial Sequence
  Description of Artificial Sequence: Synthetic oligonucleotide
ggaaagagatccagcctggctt

SEQ ID NO: 1879 - DNA, 22 bp, Artificial Sequence
  Description of Artificial Sequence: Synthetic oligonucleotide
gccactccaggtaagagccgaa

SEQ ID NO: 1880 - DNA, 30 bp, Artificial Sequence
  Description of Artificial Sequence: Synthetic oligonucleotide
tgatagattaaatgtttctaggaatttgct

SEQ ID NO: 1881 - DNA, 28 bp, Artificial Sequence
  Description of Artificial Sequence: Synthetic oligonucleotide
tggaaatattcgattgcttagagtgaca

SEQ ID NO: 1882 - DNA, 19 bp, Artificial Sequence
  Description of Artificial Sequence: Synthetic oligonucleotide
ggacatgggggtggggtgg

SEQ ID NO: 1883 - DNA, 29 bp, Artificial Sequence
  Description of Artificial Sequence: Synthetic oligonucleotide
tgaaaaacacttagcatagctcctactca

SEQ ID NO: 1884 - DNA, 27 bp, Artificial Sequence
  Description of Artificial Sequence: Synthetic oligonucleotide
tccatattgtaataattggcaggatca

SEQ ID NO: 1885 - DNA, 22 bp, Artificial Sequence
  Description of Artificial Sequence: Synthetic oligonucleotide
acctggagaacgggaaggagat

SEQ ID NO: 1886 - DNA, 21 bp, Artificial Sequence
  Description of Artificial Sequence: Synthetic oligonucleotide
cgcttccagcgagtgacaaga

SEQ ID NO: 1887 - DNA, 30 bp, Artificial Sequence
  Description of Artificial Sequence: Synthetic oligonucleotide
ccaagcgaaaaattatgtatcatctataca

SEQ ID NO: 1888 - DNA, 18 bp, Artificial Sequence
  Description of Artificial Sequence: Synthetic oligonucleotide
cgcccctcgtggaggcca

SEQ ID NO: 1889 - DNA, 25 bp, Artificial Sequence
  Description of Artificial Sequence: Synthetic oligonucleotide
tctttcttttcgaagcgcagtttca

SEQ ID NO: 1890 - DNA, 21 bp, Artificial Sequence
  Description of Artificial Sequence: Synthetic oligonucleotide
gggtgggtgactggggacttt

SEQ ID NO: 1891 - DNA, 22 bp, Artificial Sequence
  Description of Artificial Sequence: Synthetic oligonucleotide
caggctggagcagagagccatc

SEQ ID NO: 1892 - DNA, 28 bp, Artificial Sequence
  Description of Artificial Sequence: Synthetic oligonucleotide
ttctactttatttcatattcccaccaca

SEQ ID NO: 1893 - DNA, 21 bp, Artificial Sequence
  Description of Artificial Sequence: Synthetic oligonucleotide
aaagcctctctggcggcatcg

SEQ ID NO: 1894 - DNA, 25 bp, Artificial Sequence
  Description of Artificial Sequence: Synthetic oligonucleotide
gtgtggggctattgcacttagaata

SEQ ID NO: 1895 - DNA, 26 bp, Artificial Sequence
  Description of Artificial Sequence: Synthetic oligonucleotide
tcagtaataaggtgaaatggccataa

SEQ ID NO: 1896 - DNA, 29 bp, Artificial Sequence
  Description of Artificial Sequence: Synthetic oligonucleotide
aattgaagctaaacattttttctttaggt

SEQ ID NO: 1897 - DNA, 19 bp, Artificial Sequence
  Description of Artificial Sequence: Synthetic oligonucleotide
ggtcaatggcctgccagca

SEQ ID NO: 1898 - DNA, 20 bp, Artificial Sequence
  Description of Artificial Sequence: Synthetic oligonucleotide
agtttgccatccaccgccta

SEQ ID NO: 1899 - DNA, 20 bp, Artificial Sequence
  Description of Artificial Sequence: Synthetic oligonucleotide
cacctcaggcagaccaggca

SEQ ID NO: 1900 - DNA, 20 bp, Artificial Sequence
  Description of Artificial Sequence: Synthetic oligonucleotide
gcccttcaagtggtgtgggc

SEQ ID NO: 1901 - DNA, 19 bp, Artificial Sequence
  Description of Artificial Sequence: Synthetic oligonucleotide
ctggtgcaggcctggggca

SEQ ID NO: 1902 - DNA, 28 bp, Artificial Sequence
  Description of Artificial Sequence: Synthetic oligonucleotide
aacaggatacaggaggaggacttaagta

SEQ ID NO: 1903 - DNA, 21 bp, Artificial Sequence
  Description of Artificial Sequence: Synthetic oligonucleotide
gactgtgagcctggggtgcta

SEQ ID NO: 1904 - DNA, 19 bp, Artificial Sequence
  Description of Artificial Sequence: Synthetic oligonucleotide
gtgggaaagaggagtcgct

SEQ ID NO: 1905 - DNA, 21 bp, Artificial Sequence
  Description of Artificial Sequence: Synthetic oligonucleotide
gcttcaccaagcccctttcgc

SEQ ID NO: 1906 - DNA, 20 bp, Artificial Sequence
  Description of Artificial Sequence: Synthetic oligonucleotide
gtttttgtgccgagccccca

SEQ ID NO: 1907 - DNA, 28 bp, Artificial Sequence
  Description of Artificial Sequence: Synthetic oligonucleotide
tgggtatgaaaatgcagttagatagaat

SEQ ID NO: 1908 - DNA, 30 bp, Artificial Sequence
  Description of Artificial Sequence: Synthetic oligonucleotide
tgttctacacttagagtcaaagcaaattat

SEQ ID NO: 1909 - DNA, 23 bp, Artificial Sequence
  Description of Artificial Sequence: Synthetic oligonucleotide
agcaaagacttgcacatggtaat

SEQ ID NO: 1910 - DNA, 20 bp, Artificial Sequence
  Description of Artificial Sequence: Synthetic oligonucleotide
cgggggtggaggcattacct

SEQ ID NO: 1911 - DNA, 21 bp, Artificial Sequence
  Description of Artificial Sequence: Synthetic oligonucleotide
agtcccccactcccccagctg

SEQ ID NO: 1912 - DNA, 19 bp, Artificial Sequence
  Description of Artificial Sequence: Synthetic oligonucleotide
ggagggggcactggggtaa

SEQ ID NO: 1913 - DNA, 22 bp, Artificial Sequence
  Description of Artificial Sequence: Synthetic oligonucleotide
ctccccagtttctgggacacct

SEQ ID NO: 1914 - DNA, 21 bp, Artificial Sequence
  Description of Artificial Sequence: Synthetic oligonucleotide
aaaagtacaagcggccccgtt

SEQ ID NO: 1915 - DNA, 19 bp, Artificial Sequence
  Description of Artificial Sequence: Synthetic oligonucleotide
caccgtcccacccacaccg

SEQ ID NO: 1916 - DNA, 26 bp, Artificial Sequence
  Description of Artificial Sequence: Synthetic oligonucleotide
ttccccaagttagacaggaagagata

SEQ ID NO: 1917 - DNA, 29 bp, Artificial Sequence
  Description of Artificial Sequence: Synthetic oligonucleotide
gaaaactggaaggttaggtaaaactgtgt

SEQ ID NO: 1918 - DNA, 29 bp, Artificial Sequence
  Description of Artificial Sequence: Synthetic oligonucleotide
aaaaaatgataagtatgcaaggcaataga

SEQ ID NO: 1919 - DNA, 22 bp, Artificial Sequence
  Description of Artificial Sequence: Synthetic oligonucleotide
gttggtccatggaaagcagcgt

SEQ ID NO: 1920 - DNA, 22 bp, Artificial Sequence
  Description of Artificial Sequence: Synthetic oligonucleotide
attggtgcagacaccctgcttt

SEQ ID NO: 1921 - DNA, 25 bp, Artificial Sequence
  Description of Artificial Sequence: Synthetic oligonucleotide
ccgagatcacgtcactgcactctac

SEQ ID NO: 1922 - DNA, 24 bp, Artificial Sequence
  Description of Artificial Sequence: Synthetic oligonucleotide
atgccagggttgcagtgagctagt

SEQ ID NO: 1923 - DNA, 20 bp, Artificial Sequence
  Description of Artificial Sequence: Synthetic oligonucleotide
gtgggaatccgccccactct

SEQ ID NO: 1924 - DNA, 27 bp, Artificial Sequence
  Description of Artificial Sequence: Synthetic oligonucleotide
caatcttcctacctcagcctctcattt

SEQ ID NO: 1925 - DNA, 20 bp, Artificial Sequence
  Description of Artificial Sequence: Synthetic oligonucleotide
cttccagcctccgctcctgg

SEQ ID NO: 1926 - DNA, 29 bp, Artificial Sequence
  Description of Artificial Sequence: Synthetic oligonucleotide
gataagtgtgtctatctactgtgtcccaa

SEQ ID NO: 1927 - DNA, 29 bp, Artificial Sequence
  Description of Artificial Sequence: Synthetic oligonucleotide
gggggacataaaatttttaaattaggtga

SEQ ID NO: 1928 - DNA, 27 bp, Artificial Sequence
  Description of Artificial Sequence: Synthetic oligonucleotide
gcttcttggtgttctcaacaattttat

SEQ ID NO: 1929 - DNA, 20 bp, Artificial Sequence
  Description of Artificial Sequence: Synthetic oligonucleotide
aggctccagggagtcggggt

SEQ ID NO: 1930 - DNA, 24 bp, Artificial Sequence
  Description of Artificial Sequence: Synthetic oligonucleotide
cctcagtgtcttccctgtgcagta

SEQ ID NO: 1931 - DNA, 29 bp, Artificial Sequence
  Description of Artificial Sequence: Synthetic oligonucleotide
tcttcttatacagctgttacacatgcaca

SEQ ID NO: 1932 - DNA, 29 bp, Artificial Sequence
  Description of Artificial Sequence: Synthetic oligonucleotide
tgtctctaagattgtttcttagctgtaaa

SEQ ID NO: 1933 - DNA, 30 bp, Artificial Sequence
  Description of Artificial Sequence: Synthetic oligonucleotide
ggaagtacagaaacctatagaagggtatca

SEQ ID NO: 1934 - DNA, 21 bp, Artificial Sequence
  Description of Artificial Sequence: Synthetic oligonucleotide
ccaagaggacgcagcactgga

SEQ ID NO: 1935 - DNA, 21 bp, Artificial Sequence
  Description of Artificial Sequence: Synthetic oligonucleotide
gcacggatgtctgcctcctgt

SEQ ID NO: 1936 - DNA, 26 bp, Artificial Sequence
  Description of Artificial Sequence: Synthetic oligonucleotide
ttctccatgtccttggctatatttgt

SEQ ID NO: 1937 - DNA, 23 bp, Artificial Sequence
  Description of Artificial Sequence: Synthetic oligonucleotide
tccctggtcccttcattttctga

SEQ ID NO: 1938 - DNA, 27 bp, Artificial Sequence
  Description of Artificial Sequence: Synthetic oligonucleotide
tccttttcttttaatgtcattgtttga

SEQ ID NO: 1939 - DNA, 24 bp, Artificial Sequence
  Description of Artificial Sequence: Synthetic oligonucleotide
catacctgtgttggccctgacaga

SEQ ID NO: 1940 - DNA, 30 bp, Artificial Sequence
  Description of Artificial Sequence: Synthetic oligonucleotide
gcatttaataatagcatcatcttcacagga

SEQ ID NO: 1941 - DNA, 20 bp, Artificial Sequence
  Description of Artificial Sequence: Synthetic oligonucleotide
ccgcatctcctggagttggc

SEQ ID NO: 1942 - DNA, 21 bp, Artificial Sequence
  Description of Artificial Sequence: Synthetic oligonucleotide
ggaagggaagggtcccgtgaa

SEQ ID NO: 1943 - DNA, 22 bp, Artificial Sequence
  Description of Artificial Sequence: Synthetic oligonucleotide
ttgttgcccacttaggggctgt

SEQ ID NO: 1944 - DNA, 26 bp, Artificial Sequence
  Description of Artificial Sequence: Synthetic oligonucleotide
tgttctgggtactaatccttttcata

SEQ ID NO: 1945 - DNA, 18 bp, Artificial Sequence
  Description of Artificial Sequence: Synthetic oligonucleotide
cactgcccaccgggcttt

SEQ ID NO: 1946 - DNA, 28 bp, Artificial Sequence
  Description of Artificial Sequence: Synthetic oligonucleotide
accctaagtggtctcaattgtttactaa

SEQ ID NO: 1947 - DNA, 20 bp, Artificial Sequence
  Description of Artificial Sequence: Synthetic oligonucleotide
cggagtctcggaacgcctgt

SEQ ID NO: 1948 - DNA, 27 bp, Artificial Sequence
  Description of Artificial Sequence: Synthetic oligonucleotide
aagcaatggcaattaaaagtagagtaa

SEQ ID NO: 1949 - DNA, 26 bp, Artificial Sequence
  Description of Artificial Sequence: Synthetic oligonucleotide
tgccaccttctgtacgagtttgtttt

SEQ ID NO: 1950 - DNA, 30 bp, Artificial Sequence
  Description of Artificial Sequence: Synthetic oligonucleotide
gagaatggatacttgaggatcagtatagtt

SEQ ID NO: 1951 - DNA, 24 bp, Artificial Sequence
  Description of Artificial Sequence: Synthetic oligonucleotide
caaagggtctcattcagctcacct

SEQ ID NO: 1952 - DNA, 30 bp, Artificial Sequence
  Description of Artificial Sequence: Synthetic oligonucleotide
tgattgagatgatatttttaaacaaaaaaa

SEQ ID NO: 1953 - DNA, 30 bp, Artificial Sequence
  Description of Artificial Sequence: Synthetic oligonucleotide
agaagtcttttcaatacctttttgaacaat

SEQ ID NO: 1954 - DNA, 19 bp, Artificial Sequence
  Description of Artificial Sequence: Synthetic oligonucleotide
ggcagtggctgcgattcca

SEQ ID NO: 1955 - DNA, 30 bp, Artificial Sequence
  Description of Artificial Sequence: Synthetic oligonucleotide
tgcactagttcctaacctatgtaacctact

SEQ ID NO: 1956 - DNA, 26 bp, Artificial Sequence
  Description of Artificial Sequence: Synthetic oligonucleotide
aaataacatttattgcatgctcatta

SEQ ID NO: 1957 - DNA, 29 bp, Artificial Sequence
  Description of Artificial Sequence: Synthetic oligonucleotide
tcaatgaactctaaacttccttccaacta

SEQ ID NO: 1958 - DNA, 19 bp, Artificial Sequence
  Description of Artificial Sequence: Synthetic oligonucleotide
accgcaaccgggttcctga

SEQ ID NO: 1959 - DNA, 30 bp, Artificial Sequence
  Description of Artificial Sequence: Synthetic oligonucleotide
tcttaagtctaattaagccaaacaaactat

SEQ ID NO: 1960 - DNA, 27 bp, Artificial Sequence
  Description of Artificial Sequence: Synthetic oligonucleotide
aggacacttcaaatggtgtagtttcat

SEQ ID NO: 1961 - DNA, 22 bp, Artificial Sequence
  Description of Artificial Sequence: Synthetic oligonucleotide
ctgaagcccagagagccaagct

SEQ ID NO: 1962 - DNA, 18 bp, Artificial Sequence
  Description of Artificial Sequence: Synthetic oligonucleotide
gcggggcgggcctactgt

SEQ ID NO: 1963 - DNA, 21 bp, Artificial Sequence
  Description of Artificial Sequence: Synthetic oligonucleotide
cttctctccgaggctcgcgga

SEQ ID NO: 1964 - DNA, 27 bp, Artificial Sequence
  Description of Artificial Sequence: Synthetic oligonucleotide
gatgaatagttgcactttaattttcat

SEQ ID NO: 1965 - DNA, 28 bp, Artificial Sequence
  Description of Artificial Sequence: Synthetic oligonucleotide
tctttctagtgctgtgtctcattgtgag

SEQ ID NO: 1966 - DNA, 22 bp, Artificial Sequence
  Description of Artificial Sequence: Synthetic oligonucleotide
gtggctcgtgtccttcccaaca

SEQ ID NO: 1967 - DNA, 19 bp, Artificial Sequence
  Description of Artificial Sequence: Synthetic oligonucleotide
ctcccacccctgaacccca

SEQ ID NO: 1968 - DNA, 22 bp, Artificial Sequence
  Description of Artificial Sequence: Synthetic oligonucleotide
atcagtcaggaggccgtgcagt

SEQ ID NO: 1969 - DNA, 27 bp, Artificial Sequence
  Description of Artificial Sequence: Synthetic oligonucleotide
tggtagtttgttatagaggtttgcgta

SEQ ID NO: 1970 - DNA, 20 bp, Artificial Sequence
  Description of Artificial Sequence: Synthetic oligonucleotide
ggctgctcagctgcaggaat

SEQ ID NO: 1971 - DNA, 28 bp, Artificial Sequence
  Description of Artificial Sequence: Synthetic oligonucleotide
tgttctcaactgtgttaacttattgaaa

SEQ ID NO: 1972 - DNA, 29 bp, Artificial Sequence
  Description of Artificial Sequence: Synthetic oligonucleotide
tttctttagttagattaggctaggctgtt

SEQ ID NO: 1973 - DNA, 19 bp, Artificial Sequence
  Description of Artificial Sequence: Synthetic oligonucleotide
cagagccagccaatcccga

SEQ ID NO: 1974 - DNA, 28 bp, Artificial Sequence
  Description of Artificial Sequence: Synthetic oligonucleotide
catttaccaggagaaaccatatttcagt

SEQ ID NO: 1975 - DNA, 21 bp, Artificial Sequence
  Description of Artificial Sequence: Synthetic oligonucleotide
atctcggttgccccctaccct

SEQ ID NO: 1976 - DNA, 30 bp, Artificial Sequence
  Description of Artificial Sequence: Synthetic oligonucleotide
cacaactaactacacattctgacttaagga

SEQ ID NO: 1977 - DNA, 18 bp, Artificial Sequence
  Description of Artificial Sequence: Synthetic oligonucleotide
gggggtgggtggggcaga

SEQ ID NO: 1978 - DNA, 22 bp, Artificial Sequence
  Description of Artificial Sequence: Synthetic oligonucleotide
ctgcactccatctcggccagtt

SEQ ID NO: 1979 - DNA, 20 bp, Artificial Sequence
  Description of Artificial Sequence: Synthetic oligonucleotide
ctttgcgcgcggcgctaact

SEQ ID NO: 1980 - DNA, 18 bp, Artificial Sequence
  Description of Artificial Sequence: Synthetic oligonucleotide
ggcccctcagtgaggggt

SEQ ID NO: 1981 - DNA, 19 bp, Artificial Sequence
  Description of Artificial Sequence: Synthetic oligonucleotide
aggggctgagtgggggaat

SEQ ID NO: 1982 - DNA, 23 bp, Artificial Sequence
  Description of Artificial Sequence: Synthetic oligonucleotide
cagacatgagttactgcgcccca

SEQ ID NO: 1983 - DNA, 19 bp, Artificial Sequence
  Description of Artificial Sequence: Synthetic oligonucleotide
gggagaggcccttgccaca

SEQ ID NO: 1984 - DNA, 23 bp, Artificial Sequence
  Description of Artificial Sequence: Synthetic oligonucleotide
ctgtcccacaacgctcactcagt

SEQ ID NO: 1985 - DNA, 18 bp, Artificial Sequence
  Description of Artificial Sequence: Synthetic oligonucleotide
ggccaggggctggagggt

SEQ ID NO: 1986 - DNA, 22 bp, Artificial Sequence
  Description of Artificial Sequence: Synthetic oligonucleotide
agttgttggtggaagcgggaga

SEQ ID NO: 1987 - DNA, 20 bp, Artificial Sequence
  Description of Artificial Sequence: Synthetic oligonucleotide
gaggtctcccgcaggagcca

SEQ ID NO: 1988 - DNA, 29 bp, Artificial Sequence
  Description of Artificial Sequence: Synthetic oligonucleotide
cctcccaaatctcataatactgagtttca

SEQ ID NO: 1989 - DNA, 19 bp, Artificial Sequence
  Description of Artificial Sequence: Synthetic oligonucleotide
gacccccggaaacgtccca

SEQ ID NO: 1990 - DNA, 24 bp, Artificial Sequence
  Description of Artificial Sequence: Synthetic oligonucleotide
cactccccttgttccatctttcct

SEQ ID NO: 1991 - DNA, 23 bp, Artificial Sequence
  Description of Artificial Sequence: Synthetic oligonucleotide
cccatcaagaagagcctcacgat

SEQ ID NO: 1992 - DNA, 24 bp, Artificial Sequence
  Description of Artificial Sequence: Synthetic oligonucleotide
ttcttctgaatgtcccacccactt

SEQ ID NO: 1993 - DNA, 24 bp, Artificial Sequence
  Description of Artificial Sequence: Synthetic oligonucleotide
acagcagaattctccagggaagaa

SEQ ID NO: 1994 - DNA, 25 bp, Artificial Sequence
  Description of Artificial Sequence: Synthetic oligonucleotide
ggtagaactgccctcataagcaggt

SEQ ID NO: 1995 - DNA, 25 bp, Artificial Sequence
  Description of Artificial Sequence: Synthetic oligonucleotide
tgacatctgagaaatgggatggaat

SEQ ID NO: 1996 - DNA, 23 bp, Artificial Sequence
  Description of Artificial Sequence: Synthetic oligonucleotide
ggatgggagctccctgtacagga

SEQ ID NO: 1997 - DNA, 23 bp, Artificial Sequence
  Description of Artificial Sequence: Synthetic oligonucleotide
caagccctgttcttcctctccca

SEQ ID NO: 1998 - DNA, 24 bp, Artificial Sequence
  Description of Artificial Sequence: Synthetic oligonucleotide
ccatactctactggcacaaggcat

SEQ ID NO: 1999 - DNA, 21 bp, Artificial Sequence
  Description of Artificial Sequence: Synthetic oligonucleotide
agtatgggaggcaggcagcaa

SEQ ID NO: 2000 - DNA, 25 bp, Artificial Sequence
  Description of Artificial Sequence: Synthetic oligonucleotide
aacagctttgggtatagtctcgggt

SEQ ID NO: 2001 - DNA, 24 bp, Artificial Sequence
  Description of Artificial Sequence: Synthetic oligonucleotide
cttaagcacacctttcagcccaca

SEQ ID NO: 2002 - DNA, 23 bp, Artificial Sequence
  Description of Artificial Sequence: Synthetic oligonucleotide
ccatggagctcttgggaatctca

SEQ ID NO: 2003 - DNA, 24 bp, Artificial Sequence
  Description of Artificial Sequence: Synthetic oligonucleotide
tgcacagtataggcaaatcagggg

SEQ ID NO: 2004 - DNA, 26 bp, Artificial Sequence
  Description of Artificial Sequence: Synthetic oligonucleotide
gctgcaaagatattgggttttggtta

SEQ ID NO: 2005 - DNA, 26 bp, Artificial Sequence
  Description of Artificial Sequence: Synthetic oligonucleotide
caaaattcacttgtgccctatggaga

SEQ ID NO: 2006 - DNA, 22 bp, Artificial Sequence
  Description of Artificial Sequence: Synthetic oligonucleotide
gggctccctgtccttgtggtat

SEQ ID NO: 2007 - DNA, 23 bp, Artificial Sequence
  Description of Artificial Sequence: Synthetic oligonucleotide
tggttggacccagtaacccagac

SEQ ID NO: 2008 - DNA, 21 bp, Artificial Sequence
  Description of Artificial Sequence: Synthetic oligonucleotide
caaagccagcaatgtcaggct

SEQ ID NO: 2009 - DNA, 23 bp, Artificial Sequence
  Description of Artificial Sequence: Synthetic oligonucleotide
gtcacatgctgcctgagtcacat

SEQ ID NO: 2010 - DNA, 25 bp, Artificial Sequence
  Description of Artificial Sequence: Synthetic oligonucleotide
cgtgaattcttcccaatttagccta

SEQ ID NO: 2011 - DNA, 24 bp, Artificial Sequence
  Description of Artificial Sequence: Synthetic oligonucleotide
caggacatcaacatcctcctcact

SEQ ID NO: 2012 - DNA, 24 bp, Artificial Sequence
  Description of Artificial Sequence: Synthetic oligonucleotide
ggggttatatcctcttccctccca

SEQ ID NO: 2013 - DNA, 24 bp, Artificial Sequence
  Description of Artificial Sequence: Synthetic oligonucleotide
cagggacactttattgctcaccct

SEQ ID NO: 2014 - DNA, 25 bp, Artificial Sequence
  Description of Artificial Sequence: Synthetic oligonucleotide
cccctgagaccttactccttccagt

SEQ ID NO: 2015 - DNA, 24 bp, Artificial Sequence
  Description of Artificial Sequence: Synthetic oligonucleotide
tgcagggtgtttgtaaacagcagt

SEQ ID NO: 2016 - DNA, 20 bp, Artificial Sequence
  Description of Artificial Sequence: Synthetic oligonucleotide
cggatgtgaccctggaccct

SEQ ID NO: 2017 - DNA, 27 bp, Artificial Sequence
  Description of Artificial Sequence: Synthetic oligonucleotide
ggtttaacccaggatctcactgaaaac

SEQ ID NO: 2018 - DNA, 24 bp, Artificial Sequence
  Description of Artificial Sequence: Synthetic oligonucleotide
ctgccccttgtctgcactaaacta

SEQ ID NO: 2019 - DNA, 25 bp, Artificial Sequence
  Description of Artificial Sequence: Synthetic oligonucleotide
tggaaaatatacctggggactgaaa

SEQ ID NO: 2020 - DNA, 23 bp, Artificial Sequence
  Description of Artificial Sequence: Synthetic oligonucleotide
tcgacagccctcaagatctggtt

SEQ ID NO: 2021 - DNA, 22 bp, Artificial Sequence
  Description of Artificial Sequence: Synthetic oligonucleotide
gatggattcaccccatctccca

SEQ ID NO: 2022 - DNA, 22 bp, Artificial Sequence
  Description of Artificial Sequence: Synthetic oligonucleotide
gcaagggtgtgagatgttccct

SEQ ID NO: 2023 - DNA, 24 bp, Artificial Sequence
  Description of Artificial Sequence: Synthetic oligonucleotide
cttgcattattcttcccgctctct

SEQ ID NO: 2024 - DNA, 27 bp, Artificial Sequence
  Description of Artificial Sequence: Synthetic oligonucleotide
ggacattggattcatttcctcaaaata

SEQ ID NO: 2025 - DNA, 28 bp, Artificial Sequence
  Description of Artificial Sequence: Synthetic oligonucleotide
gggtgagagctactttttctacctccta

SEQ ID NO: 2026 - DNA, 26 bp, Artificial Sequence
  Description of Artificial Sequence: Synthetic oligonucleotide
aggagctttgtgagtcctgttgtaat

SEQ ID NO: 2027 - DNA, 20 bp, Artificial Sequence
  Description of Artificial Sequence: Synthetic oligonucleotide
atcagctcccagccccacct

SEQ ID NO: 2028 - DNA, 22 bp, Artificial Sequence
  Description of Artificial Sequence: Synthetic oligonucleotide
gtcccactaccctcatccccat

SEQ ID NO: 2029 - DNA, 22 bp, Artificial Sequence
  Description of Artificial Sequence: Synthetic oligonucleotide
gccaaagaccagcaggagcata

SEQ ID NO: 2030 - DNA, 24 bp, Artificial Sequence
  Description of Artificial Sequence: Synthetic oligonucleotide
gggagaagcatacccatcctgaga

SEQ ID NO: 2031 - DNA, 22 bp, Artificial Sequence
  Description of Artificial Sequence: Synthetic oligonucleotide
cgtggttctggctccacattta

SEQ ID NO: 2032 - DNA, 24 bp, Artificial Sequence
  Description of Artificial Sequence: Synthetic oligonucleotide
gagtcagcctcagggtctgttcta

SEQ ID NO: 2033 - DNA, 23 bp, Artificial Sequence
  Description of Artificial Sequence: Synthetic oligonucleotide
cttttctctccacatcccagcct

SEQ ID NO: 2034 - DNA, 23 bp, Artificial Sequence
  Description of Artificial Sequence: Synthetic oligonucleotide
tgggaaagttggagaaccatcct

SEQ ID NO: 2035 - DNA, 24 bp, Artificial Sequence
  Description of Artificial Sequence: Synthetic oligonucleotide
ccctattcgtttttgaaccggtca

SEQ ID NO: 2036 - DNA, 23 bp, Artificial Sequence
  Description of Artificial Sequence: Synthetic oligonucleotide
ttggtagcctcgatgtcctcctt

SEQ ID NO: 2037 - DNA, 23 bp, Artificial Sequence
  Description of Artificial Sequence: Synthetic oligonucleotide
ccagccagcaagtcaatcagaac

SEQ ID NO: 2038 - DNA, 23 bp, Artificial Sequence
  Description of Artificial Sequence: Synthetic oligonucleotide
tccaggggaacatagatggctga

SEQ ID NO: 2039 - DNA, 24 bp, Artificial Sequence
  Description of Artificial Sequence: Synthetic oligonucleotide
catcagtcaggtattggggtgctt

SEQ ID NO: 2040 - DNA, 24 bp, Artificial Sequence
  Description of Artificial Sequence: Synthetic oligonucleotide
actgtgcctgcttgccattaatca

SEQ ID NO: 2041 - DNA, 24 bp, Artificial Sequence
  Description of Artificial Sequence: Synthetic oligonucleotide
ggaggaggctgaaggagaaagaaa

SEQ ID NO: 2042 - DNA, 23 bp, Artificial Sequence
  Description of Artificial Sequence: Synthetic oligonucleotide
aggaagcatcagatgggtgtcga

SEQ ID NO: 2043 - DNA, 23 bp, Artificial Sequence
  Description of Artificial Sequence: Synthetic oligonucleotide
cattcagtgctggagaccagcta

SEQ ID NO: 2044 - DNA, 23 bp, Artificial Sequence
  Description of Artificial Sequence: Synthetic oligonucleotide
tttttcgcttggatcggaaagtg

SEQ ID NO: 2045 - DNA, 23 bp, Artificial Sequence
  Description of Artificial Sequence: Synthetic oligonucleotide
aatgcatcacacaagcccacagg

SEQ ID NO: 2046 - DNA, 23 bp, Artificial Sequence
  Description of Artificial Sequence: Synthetic oligonucleotide
ttcccccatgatccctagcctat

SEQ ID NO: 2047 - DNA, 22 bp, Artificial Sequence
  Description of Artificial Sequence: Synthetic oligonucleotide
gccagtcagaactgccctcaga

SEQ ID NO: 2048 - DNA, 24 bp, Artificial Sequence
  Description of Artificial Sequence: Synthetic oligonucleotide
cagagaattgataattgcccggca

SEQ ID NO: 2049 - DNA, 24 bp, Artificial Sequence
  Description of Artificial Sequence: Synthetic oligonucleotide
aggtgatcctcttgcttgcctcta

SEQ ID NO: 2050 - DNA, 22 bp, Artificial Sequence
  Description of Artificial Sequence: Synthetic oligonucleotide
atgctcctgccctaaagtgcca

SEQ ID NO: 2051 - DNA, 24 bp, Artificial Sequence
  Description of Artificial Sequence: Synthetic oligonucleotide
caggctatttgaggttgaggcaaa

SEQ ID NO: 2052 - DNA, 22 bp, Artificial Sequence
  Description of Artificial Sequence: Synthetic oligonucleotide
aaaaaagggaaagcggcagcta

SEQ ID NO: 2053 - DNA, 23 bp, Artificial Sequence
  Description of Artificial Sequence: Synthetic oligonucleotide
cagcaattcagtcagccactgga

SEQ ID NO: 2054 - DNA, 22 bp, Artificial Sequence
  Description of Artificial Sequence: Synthetic oligonucleotide
aagggacaggctgcttggatca

SEQ ID NO: 2055 - DNA, 24 bp, Artificial Sequence
  Description of Artificial Sequence: Synthetic oligonucleotide
cacttccagaactcctcttcccag

SEQ ID NO: 2056 - DNA, 24 bp, Artificial Sequence
  Description of Artificial Sequence: Synthetic oligonucleotide
ttgagaaaaatgcatttgtcccgt

SEQ ID NO: 2057 - DNA, 22 bp, Artificial Sequence
  Description of Artificial Sequence: Synthetic oligonucleotide
gcagagaaaagcctgcactgga

SEQ ID NO: 2058 - DNA, 24 bp, Artificial Sequence
  Description of Artificial Sequence: Synthetic oligonucleotide
gcagctgagagtgagttcacacct

SEQ ID NO: 2059 - DNA, 24 bp, Artificial Sequence
  Description of Artificial Sequence: Synthetic oligonucleotide
cctggtgatctggttgctttgaca

SEQ ID NO: 2060 - DNA, 23 bp, Artificial Sequence
  Description of Artificial Sequence: Synthetic oligonucleotide
actctccctttttgcagggtcat

SEQ ID NO: 2061 - DNA, 23 bp, Artificial Sequence
  Description of Artificial Sequence: Synthetic oligonucleotide
ctgtcttcccccattcttcacct

SEQ ID NO: 2062 - DNA, 23 bp, Artificial Sequence
  Description of Artificial Sequence: Synthetic oligonucleotide
cccctattaacgctgacttggga

SEQ ID NO: 2063 - DNA, 24 bp, Artificial Sequence
  Description of Artificial Sequence: Synthetic oligonucleotide
cagagtcaccaaccccagtaccac

SEQ ID NO: 2064 - DNA, 23 bp, Artificial Sequence
  Description of Artificial Sequence: Synthetic oligonucleotide
tttcccaaggttagggacatgct

SEQ ID NO: 2065 - DNA, 24 bp, Artificial Sequence
  Description of Artificial Sequence: Synthetic oligonucleotide
ctgcttggtatttccctgaggcta

SEQ ID NO: 2066 - DNA, 25 bp, Artificial Sequence
  Description of Artificial Sequence: Synthetic oligonucleotide
cctggaaatagggtaaaagctgcat

SEQ ID NO: 2067 - DNA, 24 bp, Artificial Sequence
  Description of Artificial Sequence: Synthetic oligonucleotide
tccttgacccctccacaatctaca

SEQ ID NO: 2068 - DNA, 24 bp, Artificial Sequence
  Description of Artificial Sequence: Synthetic oligonucleotide
ccacagtcaggttgtttgatggga

SEQ ID NO: 2069 - DNA, 24 bp, Artificial Sequence
  Description of Artificial Sequence: Synthetic oligonucleotide
tcctcctcttctcacctgcttgta

SEQ ID NO: 2070 - DNA, 25 bp, Artificial Sequence
  Description of Artificial Sequence: Synthetic oligonucleotide
caccagttttaagtgcacaacccaa

SEQ ID NO: 2071 - DNA, 23 bp, Artificial Sequence
  Description of Artificial Sequence: Synthetic oligonucleotide
aggggactagggaactcccctta

SEQ ID NO: 2072 - DNA, 23 bp, Artificial Sequence
  Description of Artificial Sequence: Synthetic oligonucleotide
tggcacaaggtcctatttggagt

SEQ ID NO: 2073 - DNA, 24 bp, Artificial Sequence
  Description of Artificial Sequence: Synthetic oligonucleotide
gcacttgtccctccttgtgtgtta

SEQ ID NO: 2074 - DNA, 23 bp, Artificial Sequence
  Description of Artificial Sequence: Synthetic oligonucleotide
gtcccttgaaggggaagtaggga

SEQ ID NO: 2075 - DNA, 24 bp, Artificial Sequence
  Description of Artificial Sequence: Synthetic oligonucleotide
cctcattttcagttctgggatgga

SEQ ID NO: 2076 - DNA, 23 bp, Artificial Sequence
  Description of Artificial Sequence: Synthetic oligonucleotide
cccttcatgcttatgtctcccca

SEQ ID NO: 2077 - DNA, 24 bp, Artificial Sequence
  Description of Artificial Sequence: Synthetic oligonucleotide
tttacaagctgcatcccatctcat

SEQ ID NO: 2078 - DNA, 23 bp, Artificial Sequence
  Description of Artificial Sequence: Synthetic oligonucleotide
cttacgcccatctcggacaaaaa

SEQ ID NO: 2079 - DNA, 22 bp, Artificial Sequence
  Description of Artificial Sequence: Synthetic oligonucleotide
gttgaacatcatggttgccgat

SEQ ID NO: 2080 - DNA, 23 bp, Artificial Sequence
  Description of Artificial Sequence: Synthetic oligonucleotide
gaacactgtgggccctcaagttg

SEQ ID NO: 2081 - DNA, 23 bp, Artificial Sequence
  Description of Artificial Sequence: Synthetic oligonucleotide
gggatagatgaaaggggccatct

SEQ ID NO: 2082 - DNA, 24 bp, Artificial Sequence
  Description of Artificial Sequence: Synthetic oligonucleotide
tttttcctgcatcctgtctggaaa

SEQ ID NO: 2083 - DNA, 23 bp, Artificial Sequence
  Description of Artificial Sequence: Synthetic oligonucleotide
ccctcatggtcatgagctccatt

SEQ ID NO: 2084 - DNA, 24 bp, Artificial Sequence
  Description of Artificial Sequence: Synthetic oligonucleotide
gcaatgttcacacaaaaaatgcct

SEQ ID NO: 2085 - DNA, 24 bp, Artificial Sequence
  Description of Artificial Sequence: Synthetic oligonucleotide
tggaaacgggattacaatgaagca

SEQ ID NO: 2086 - DNA, 25 bp, Artificial Sequence
  Description of Artificial Sequence: Synthetic oligonucleotide
ggcactgatggtacctcattaggca

SEQ ID NO: 2087 - DNA, 24 bp, Artificial Sequence
  Description of Artificial Sequence: Synthetic oligonucleotide
tcttctgtgtcacacacagccctg

SEQ ID NO: 2088 - DNA, 25 bp, Artificial Sequence
  Description of Artificial Sequence: Synthetic oligonucleotide
cagttgccatactgaacagccattt

SEQ ID NO: 2089 - DNA, 23 bp, Artificial Sequence
  Description of Artificial Sequence: Synthetic oligonucleotide
ctgcttgctctaaacccagcaat

SEQ ID NO: 2090 - DNA, 22 bp, Artificial Sequence
  Description of Artificial Sequence: Synthetic oligonucleotide
ccaaatccagaggctccaacat

SEQ ID NO: 2091 - DNA, 24 bp, Artificial Sequence
  Description of Artificial Sequence: Synthetic oligonucleotide
tccttgttgcactggttaggatga

SEQ ID NO: 2092 - DNA, 21 bp, Artificial Sequence
  Description of Artificial Sequence: Synthetic oligonucleotide
gagtggggtggggtgaaatgt

SEQ ID NO: 2093 - DNA, 25 bp, Artificial Sequence
  Description of Artificial Sequence: Synthetic oligonucleotide
gacacatactgtccaattcccctgt

SEQ ID NO: 2094 - DNA, 25 bp, Artificial Sequence
  Description of Artificial Sequence: Synthetic oligonucleotide
tgcagttcactgactctcctgcata

SEQ ID NO: 2095 - DNA, 24 bp, Artificial Sequence
  Description of Artificial Sequence: Synthetic oligonucleotide
aaagtctcccagctgctccttctt

SEQ ID NO: 2096 - DNA, 23 bp, Artificial Sequence
  Description of Artificial Sequence: Synthetic oligonucleotide
agctcagaccttggccatgaaca

SEQ ID NO: 2097 - DNA, 22 bp, Artificial Sequence
  Description of Artificial Sequence: Synthetic oligonucleotide
ctgcacaatagaagcccccctt

SEQ ID NO: 2098 - DNA, 25 bp, Artificial Sequence
  Description of Artificial Sequence: Synthetic oligonucleotide
agtgaggccagattttcctcttgta

SEQ ID NO: 2099 - DNA, 22 bp, Artificial Sequence
  Description of Artificial Sequence: Synthetic oligonucleotide
ctcgtgtttcctgatcctgcct

SEQ ID NO: 2100 - DNA, 21 bp, Artificial Sequence
  Description of Artificial Sequence: Synthetic oligonucleotide
cgcttcaccccagaagcagtg

SEQ ID NO: 2101 - DNA, 22 bp, Artificial Sequence
  Description of Artificial Sequence: Synthetic oligonucleotide
aacaatggggaggcgtttctct

SEQ ID NO: 2102 - DNA, 23 bp, Artificial Sequence
  Description of Artificial Sequence: Synthetic oligonucleotide
gagcattggatattcccatccct

SEQ ID NO: 2103 - DNA, 23 bp, Artificial Sequence
  Description of Artificial Sequence: Synthetic oligonucleotide
agttgtgtggcagaaggggaact

SEQ ID NO: 2104 - DNA, 25 bp, Artificial Sequence
  Description of Artificial Sequence: Synthetic oligonucleotide
gcaacttgggagagtgtgagcttca

SEQ ID NO: 2105 - DNA, 22 bp, Artificial Sequence
  Description of Artificial Sequence: Synthetic oligonucleotide
ccgtttggattcccaggagaca

SEQ ID NO: 2106 - DNA, 25 bp, Artificial Sequence
  Description of Artificial Sequence: Synthetic oligonucleotide
tgagaatggtggttcttccatcacg

SEQ ID NO: 2107 - DNA, 25 bp, Artificial Sequence
  Description of Artificial Sequence: Synthetic oligonucleotide
gggtcttgggttagagccaaaatgg

SEQ ID NO: 2108 - DNA, 22 bp, Artificial Sequence
  Description of Artificial Sequence: Synthetic oligonucleotide
ctactggctgggggatcaccaa

SEQ ID NO: 2109 - DNA, 24 bp, Artificial Sequence
  Description of Artificial Sequence: Synthetic oligonucleotide
cccacagaaccacagactttgaac

SEQ ID NO: 2110 - DNA, 25 bp, Artificial Sequence
  Description of Artificial Sequence: Synthetic oligonucleotide
aaaaatggaggagaaaacaacccaa

SEQ ID NO: 2111 - DNA, 24 bp, Artificial Sequence
  Description of Artificial Sequence: Synthetic oligonucleotide
tttgccatcactgccattaaggta

SEQ ID NO: 2112 - DNA, 23 bp, Artificial Sequence
  Description of Artificial Sequence: Synthetic oligonucleotide
atagtcagcccacccgctcaact

SEQ ID NO: 2113 - DNA, 24 bp, Artificial Sequence
  Description of Artificial Sequence: Synthetic oligonucleotide
ggcccctatcacttccatatgtgt

SEQ ID NO: 2114 - DNA, 25 bp, Artificial Sequence
  Description of Artificial Sequence: Synthetic oligonucleotide
gaaactccaagtctggaatcagcaa

SEQ ID NO: 2115 - DNA, 24 bp, Artificial Sequence
  Description of Artificial Sequence: Synthetic oligonucleotide
gtctgttggggcttagtgcattta

SEQ ID NO: 2116 - DNA, 24 bp, Artificial Sequence
  Description of Artificial Sequence: Synthetic oligonucleotide
gctgtgcgactgggcaatattttt

SEQ ID NO: 2117 - DNA, 22 bp, Artificial Sequence
  Description of Artificial Sequence: Synthetic oligonucleotide
ctgagaatctgggggtgaggaa

SEQ ID NO: 2118 - DNA, 25 bp, Artificial Sequence
  Description of Artificial Sequence: Synthetic oligonucleotide
acactggacccattttgcagataga

SEQ ID NO: 2119 - DNA, 22 bp, Artificial Sequence
  Description of Artificial Sequence: Synthetic oligonucleotide
tgggccgttcagagtgtcatca

SEQ ID NO: 2120 - DNA, 25 bp, Artificial Sequence
  Description of Artificial Sequence: Synthetic oligonucleotide
ccctaactgcatcaccttttccctt

SEQ ID NO: 2121 - DNA, 25 bp, Artificial Sequence
  Description of Artificial Sequence: Synthetic oligonucleotide
tgacttggccaagttacacctcagt

SEQ ID NO: 2122 - DNA, 24 bp, Artificial Sequence
  Description of Artificial Sequence: Synthetic oligonucleotide
tgagggttggaaaagcttgtctga

SEQ ID NO: 2123 - DNA, 25 bp, Artificial Sequence
  Description of Artificial Sequence: Synthetic oligonucleotide
cccagtcatcctcagtttctttcat

SEQ ID NO: 2124 - DNA, 23 bp, Artificial Sequence
  Description of Artificial Sequence: Synthetic oligonucleotide
agggagatcagcttgctcacagt

SEQ ID NO: 2125 - DNA, 25 bp, Artificial Sequence
  Description of Artificial Sequence: Synthetic oligonucleotide
ccatgagagatgcaaagtgcttgaa

SEQ ID NO: 2126 - DNA, 25 bp, Artificial Sequence
  Description of Artificial Sequence: Synthetic oligonucleotide
ccgtaggcacaaaaatggtaaagga

SEQ ID NO: 2127 - DNA, 26 bp, Artificial Sequence
  Description of Artificial Sequence: Synthetic oligonucleotide
caggagactaagacgtgtcctttgct

SEQ ID NO: 2128 - DNA, 23 bp, Artificial Sequence
  Description of Artificial Sequence: Synthetic oligonucleotide
gccccatcaagccgacttctact

SEQ ID NO: 2129 - DNA, 22 bp, Artificial Sequence
  Description of Artificial Sequence: Synthetic oligonucleotide
aagatctggggttggggatgga

SEQ ID NO: 2130 - DNA, 23 bp, Artificial Sequence
  Description of Artificial Sequence: Synthetic oligonucleotide
cctcccaactcctcctgcaaaga

SEQ ID NO: 2131 - DNA, 25 bp, Artificial Sequence
  Description of Artificial Sequence: Synthetic oligonucleotide
ctccagttctttgcaaatgacatga

SEQ ID NO: 2132 - DNA, 25 bp, Artificial Sequence
  Description of Artificial Sequence: Synthetic oligonucleotide
agcagggaacaggaaactcagtctt

SEQ ID NO: 2133 - DNA, 25 bp, Artificial Sequence
  Description of Artificial Sequence: Synthetic oligonucleotide
acagccactagtcacatgtggctat

SEQ ID NO: 2134 - DNA, 25 bp, Artificial Sequence
  Description of Artificial Sequence: Synthetic oligonucleotide
caagataggggtgaagaggtggaaa

SEQ ID NO: 2135 - DNA, 23 bp, Artificial Sequence
  Description of Artificial Sequence: Synthetic oligonucleotide
cttcaggcctacctagcccaggt

SEQ ID NO: 2136 - DNA, 25 bp, Artificial Sequence
  Description of Artificial Sequence: Synthetic oligonucleotide
tgctcctataccctggtcaacatta

SEQ ID NO: 2137 - DNA, 24 bp, Artificial Sequence
  Description of Artificial Sequence: Synthetic oligonucleotide
ctgggaccatagtccccttcaata

SEQ ID NO: 2138 - DNA, 24 bp, Artificial Sequence
  Description of Artificial Sequence: Synthetic oligonucleotide
cgtctcagcccgtgaaaaaaactt

SEQ ID NO: 2139 - DNA, 23 bp, Artificial Sequence
  Description of Artificial Sequence: Synthetic oligonucleotide
ccttgtgaatcccatcctggaat

SEQ ID NO: 2140 - DNA, 25 bp, Artificial Sequence
  Description of Artificial Sequence: Synthetic oligonucleotide
gcctccttaatgccagtggtaacat

SEQ ID NO: 2141 - DNA, 25 bp, Artificial Sequence
  Description of Artificial Sequence: Synthetic oligonucleotide
gactcaatcttccttcctcttgcct

SEQ ID NO: 2142 - DNA, 23 bp, Artificial Sequence
  Description of Artificial Sequence: Synthetic oligonucleotide
gggtctctgcccttgtctttgct

SEQ ID NO: 2143 - DNA, 25 bp, Artificial Sequence
  Description of Artificial Sequence: Synthetic oligonucleotide
ctgcttccttctttacttccctgga

SEQ ID NO: 2144 - DNA, 24 bp, Artificial Sequence
  Description of Artificial Sequence: Synthetic oligonucleotide
cacacacctacatcctgccaagat

SEQ ID NO: 2145 - DNA, 24 bp, Artificial Sequence
  Description of Artificial Sequence: Synthetic oligonucleotide
agaacacaggctctgctgtcaagt

SEQ ID NO: 2146 - DNA, 26 bp, Artificial Sequence
  Description of Artificial Sequence: Synthetic oligonucleotide
cagatgcacctatttcatggttcaga

SEQ ID NO: 2147 - DNA, 21 bp, Artificial Sequence
  Description of Artificial Sequence: Synthetic oligonucleotide
aggaacaggacccctgccaaa

SEQ ID NO: 2148 - DNA, 22 bp, Artificial Sequence
  Description of Artificial Sequence: Synthetic oligonucleotide
cctcctcaggaaggtcgggaca

SEQ ID NO: 2149 - DNA, 25 bp, Artificial Sequence
  Description of Artificial Sequence: Synthetic oligonucleotide
tgaggaaaagagaatgatgggaaaa

SEQ ID NO: 2150 - DNA, 26 bp, Artificial Sequence
  Description of Artificial Sequence: Synthetic oligonucleotide
tgcctctgagtcattgtgtttttcaa

SEQ ID NO: 2151 - DNA, 25 bp, Artificial Sequence
  Description of Artificial Sequence: Synthetic oligonucleotide
gttctggcagttgactttcctgaca

SEQ ID NO: 2152 - DNA, 23 bp, Artificial Sequence
  Description of Artificial Sequence: Synthetic oligonucleotide
acgttgaagcagccttgcattct

SEQ ID NO: 2153 - DNA, 22 bp, Artificial Sequence
  Description of Artificial Sequence: Synthetic oligonucleotide
agggggcttgaccttcaaggaa

SEQ ID NO: 2154 - DNA, 24 bp, Artificial Sequence
  Description of Artificial Sequence: Synthetic oligonucleotide
gcattctgtggggctgtctaaaac

SEQ ID NO: 2155 - DNA, 22 bp, Artificial Sequence
  Description of Artificial Sequence: Synthetic oligonucleotide
aggggaatgggggtgcttagac

SEQ ID NO: 2156 - DNA, 25 bp, Artificial Sequence
  Description of Artificial Sequence: Synthetic oligonucleotide
tcatgtttttttggccacatgtaca

SEQ ID NO: 2157 - DNA, 25 bp, Artificial Sequence
  Description of Artificial Sequence: Synthetic oligonucleotide
ttttagtccctctgcttccctcttt

SEQ ID NO: 2158 - DNA, 21 bp, Artificial Sequence
  Description of Artificial Sequence: Synthetic oligonucleotide
gaagcctttgcttggccctta

SEQ ID NO: 2159 - DNA, 25 bp, Artificial Sequence
  Description of Artificial Sequence: Synthetic oligonucleotide
gcaggcacatcagaataggagagat

SEQ ID NO: 2160 - DNA, 25 bp, Artificial Sequence
  Description of Artificial Sequence: Synthetic oligonucleotide
ccctgtgaaaatgagattgcattct

SEQ ID NO: 2161 - DNA, 25 bp, Artificial Sequence
  Description of Artificial Sequence: Synthetic oligonucleotide
gtgtttcctgcactcatcttgtgat

SEQ ID NO: 2162 - DNA, 24 bp, Artificial Sequence
  Description of Artificial Sequence: Synthetic oligonucleotide
ctgcttggtcttcagggaatcaat

SEQ ID NO: 2163 - DNA, 26 bp, Artificial Sequence
  Description of Artificial Sequence: Synthetic oligonucleotide
ccaacggctctaccaagatgattata

SEQ ID NO: 2164 - DNA, 26 bp, Artificial Sequence
  Description of Artificial Sequence: Synthetic oligonucleotide
cccaggcagagtattcaaaattttgt

SEQ ID NO: 2165 - DNA, 23 bp, Artificial Sequence
  Description of Artificial Sequence: Synthetic oligonucleotide
ctgagcagggtctttggaatcag

SEQ ID NO: 2166 - DNA, 26 bp, Artificial Sequence
  Description of Artificial Sequence: Synthetic oligonucleotide
tcagccaacacatctagcttagcata

SEQ ID NO: 2167 - DNA, 21 bp, Artificial Sequence
  Description of Artificial Sequence: Synthetic oligonucleotide
ccctcccatctacccacccca

SEQ ID NO: 2168 - DNA, 26 bp, Artificial Sequence
  Description of Artificial Sequence: Synthetic oligonucleotide
catttgggtgcgctaaatctttatct

SEQ ID NO: 2169 - DNA, 25 bp, Artificial Sequence
  Description of Artificial Sequence: Synthetic oligonucleotide
cagtgaatgccccatgtaaaaacat

SEQ ID NO: 2170 - DNA, 25 bp, Artificial Sequence
  Description of Artificial Sequence: Synthetic oligonucleotide
aggtcagaagggtgtttgctgttat

SEQ ID NO: 2171 - DNA, 25 bp, Artificial Sequence
  Description of Artificial Sequence: Synthetic oligonucleotide
tgatgctttggctcttggagtatca

SEQ ID NO: 2172 - DNA, 25 bp, Artificial Sequence
  Description of Artificial Sequence: Synthetic oligonucleotide
gctgccaaaaagctgactcttcttt

SEQ ID NO: 2173 - DNA, 26 bp, Artificial Sequence
  Description of Artificial Sequence: Synthetic oligonucleotide
ccctggatttggagatctctcctaca

SEQ ID NO: 2174 - DNA, 26 bp, Artificial Sequence
  Description of Artificial Sequence: Synthetic oligonucleotide
ccaaattaaacccacccttcaaagaa

SEQ ID NO: 2175 - DNA, 25 bp, Artificial Sequence
  Description of Artificial Sequence: Synthetic oligonucleotide
aactggggcacctgttcaattagtg

SEQ ID NO: 2176 - DNA, 26 bp, Artificial Sequence
  Description of Artificial Sequence: Synthetic oligonucleotide
tgggtgaggggagattatatagtgca

SEQ ID NO: 2177 - DNA, 25 bp, Artificial Sequence
  Description of Artificial Sequence: Synthetic oligonucleotide
aaagtgcacaatgcagtgacaattt

SEQ ID NO: 2178 - DNA, 22 bp, Artificial Sequence
  Description of Artificial Sequence: Synthetic oligonucleotide
tccactggcctcatttccacat

SEQ ID NO: 2179 - DNA, 23 bp, Artificial Sequence
  Description of Artificial Sequence: Synthetic oligonucleotide
aacctcaaagaatgcaggcaggt

SEQ ID NO: 2180 - DNA, 22 bp, Artificial Sequence
  Description of Artificial Sequence: Synthetic oligonucleotide
agcctgggctaggtgtctgccg

SEQ ID NO: 2181 - DNA, 23 bp, Artificial Sequence
  Description of Artificial Sequence: Synthetic oligonucleotide
gattgctttgatgctgggtcaaa

SEQ ID NO: 2182 - DNA, 20 bp, Artificial Sequence
  Description of Artificial Sequence: Synthetic oligonucleotide
ggtgggcaggtgacagggta

SEQ ID NO: 2183 - DNA, 26 bp, Artificial Sequence
  Description of Artificial Sequence: Synthetic oligonucleotide
ggaatgttaaatggttcagcctctgt

SEQ ID NO: 2184 - DNA, 26 bp, Artificial Sequence
  Description of Artificial Sequence: Synthetic oligonucleotide
cagacaccaagggctcttatgaatct

SEQ ID NO: 2185 - DNA, 26 bp, Artificial Sequence
  Description of Artificial Sequence: Synthetic oligonucleotide
tgagatttgtgtggggacataaaacg

SEQ ID NO: 2186 - DNA, 24 bp, Artificial Sequence
  Description of Artificial Sequence: Synthetic oligonucleotide
tgatctggagttacctgaggccat

SEQ ID NO: 2187 - DNA, 26 bp, Artificial Sequence
  Description of Artificial Sequence: Synthetic oligonucleotide
tgagtgtggctcttccataactgtta

SEQ ID NO: 2188 - DNA, 22 bp, Artificial Sequence
  Description of Artificial Sequence: Synthetic oligonucleotide
acagagccttgggtgctgcaga

SEQ ID NO: 2189 - DNA, 23 bp, Artificial Sequence
  Description of Artificial Sequence: Synthetic oligonucleotide
ccactgcacccaaacttcctttg

SEQ ID NO: 2190 - DNA, 21 bp, Artificial Sequence
  Description of Artificial Sequence: Synthetic oligonucleotide
ggagggaaagccctaccacct

SEQ ID NO: 2191 - DNA, 23 bp, Artificial Sequence
  Description of Artificial Sequence: Synthetic oligonucleotide
tgttgcataggaaggctctgggt

SEQ ID NO: 2192 - DNA, 24 bp, Artificial Sequence
  Description of Artificial Sequence: Synthetic oligonucleotide
ctgatctctgtttcctttgccgat

SEQ ID NO: 2193 - DNA, 23 bp, Artificial Sequence
  Description of Artificial Sequence: Synthetic oligonucleotide
gtttcacttctcccaacctgcga

SEQ ID NO: 2194 - DNA, 23 bp, Artificial Sequence
  Description of Artificial Sequence: Synthetic oligonucleotide
gtttggacagtgtgtgcccagat

SEQ ID NO: 2195 - DNA, 25 bp, Artificial Sequence
  Description of Artificial Sequence: Synthetic oligonucleotide
caaatgtgtatggaagggtggacta

SEQ ID NO: 2196 - DNA, 22 bp, Artificial Sequence
  Description of Artificial Sequence: Synthetic oligonucleotide
cttccccttcctgggatctgct

SEQ ID NO: 2197 - DNA, 24 bp, Artificial Sequence
  Description of Artificial Sequence: Synthetic oligonucleotide
caccaaaaattccacccaagatct

SEQ ID NO: 2198 - DNA, 22 bp, Artificial Sequence
  Description of Artificial Sequence: Synthetic oligonucleotide
cccagcccagacatttctccta

SEQ ID NO: 2199 - DNA, 26 bp, Artificial Sequence
  Description of Artificial Sequence: Synthetic oligonucleotide
tgtgacagtaacagaaagtgcccaga

SEQ ID NO: 2200 - DNA, 24 bp, Artificial Sequence
  Description of Artificial Sequence: Synthetic oligonucleotide
gaccctcatcagaaatcctgacgt

SEQ ID NO: 2201 - DNA, 26 bp, Artificial Sequence
  Description of Artificial Sequence: Synthetic oligonucleotide
tgctttagtgagctcagcttctctgg

SEQ ID NO: 2202 - DNA, 22 bp, Artificial Sequence
  Description of Artificial Sequence: Synthetic oligonucleotide
atggagaaggggcaggaacaaa

SEQ ID NO: 2203 - DNA, 21 bp, Artificial Sequence
  Description of Artificial Sequence: Synthetic oligonucleotide
caggttggaagacctccccaa

SEQ ID NO: 2204 - DNA, 26 bp, Artificial Sequence
  Description of Artificial Sequence: Synthetic oligonucleotide
cgtggggttcatgatttagatcacat

SEQ ID NO: 2205 - DNA, 26 bp, Artificial Sequence
  Description of Artificial Sequence: Synthetic oligonucleotide
tcgccttcatattcaatctgtgttct

SEQ ID NO: 2206 - DNA, 23 bp, Artificial Sequence
  Description of Artificial Sequence: Synthetic oligonucleotide
catcaaagactggagcgacgttc

SEQ ID NO: 2207 - DNA, 25 bp, Artificial Sequence
  Description of Artificial Sequence: Synthetic oligonucleotide
tgggaaatgaccctttttcctacaa

SEQ ID NO: 2208 - DNA, 26 bp, Artificial Sequence
  Description of Artificial Sequence: Synthetic oligonucleotide
ccctagtgaaagctacagatttgcct

SEQ ID NO: 2209 - DNA, 23 bp, Artificial Sequence
  Description of Artificial Sequence: Synthetic oligonucleotide
tgggaatttagtccccaggtgga

SEQ ID NO: 2210 - DNA, 24 bp, Artificial Sequence
  Description of Artificial Sequence: Synthetic oligonucleotide
tgatgagggaagggcatatgctta

SEQ ID NO: 2211 - DNA, 26 bp, Artificial Sequence
  Description of Artificial Sequence: Synthetic oligonucleotide
tgatgtggtaggtggaaatggttaaa

SEQ ID NO: 2212 - DNA, 20 bp, Artificial Sequence
  Description of Artificial Sequence: Synthetic oligonucleotide
acgtgatctggcccttgcca

SEQ ID NO: 2213 - DNA, 24 bp, Artificial Sequence
  Description of Artificial Sequence: Synthetic oligonucleotide
ccgctctgtaaacaccaactccca

SEQ ID NO: 2214 - DNA, 24 bp, Artificial Sequence
  Description of Artificial Sequence: Synthetic oligonucleotide
gatttgatgcagcagccttatgat

SEQ ID NO: 2215 - DNA, 20 bp, Artificial Sequence
  Description of Artificial Sequence: Synthetic oligonucleotide
gcacagtccctcccacgtct

SEQ ID NO: 2216 - DNA, 20 bp, Artificial Sequence
  Description of Artificial Sequence: Synthetic oligonucleotide
ccagggatttctggctcgct

SEQ ID NO: 2217 - DNA, 23 bp, Artificial Sequence
  Description of Artificial Sequence: Synthetic oligonucleotide
agtggagacgcaatctcccttga

SEQ ID NO: 2218 - DNA, 23 bp, Artificial Sequence
  Description of Artificial Sequence: Synthetic oligonucleotide
ctctccccaagcagaacccattt

SEQ ID NO: 2219 - DNA, 25 bp, Artificial Sequence
  Description of Artificial Sequence: Synthetic oligonucleotide
tcctaacaccgtggtagaatccttc

SEQ ID NO: 2220 - DNA, 24 bp, Artificial Sequence
  Description of Artificial Sequence: Synthetic oligonucleotide
cccaaaacagaacaggctgaaata

SEQ ID NO: 2221 - DNA, 26 bp, Artificial Sequence
  Description of Artificial Sequence: Synthetic oligonucleotide
gaggaacctcctagtcttggaacctt

SEQ ID NO: 2222 - DNA, 25 bp, Artificial Sequence
  Description of Artificial Sequence: Synthetic oligonucleotide
cattggtcaggtctatgctgtgttt

SEQ ID NO: 2223 - DNA, 27 bp, Artificial Sequence
  Description of Artificial Sequence: Synthetic oligonucleotide
caatctgtacctgcagaagcctgatat

SEQ ID NO: 2224 - DNA, 23 bp, Artificial Sequence
  Description of Artificial Sequence: Synthetic oligonucleotide
cccactcccaccttgttctacct

SEQ ID NO: 2225 - DNA, 22 bp, Artificial Sequence
  Description of Artificial Sequence: Synthetic oligonucleotide
ccacaggaggcatcctgaaggg

SEQ ID NO: 2226 - DNA, 22 bp, Artificial Sequence
  Description of Artificial Sequence: Synthetic oligonucleotide
gtggccacaggaacatggacaa

SEQ ID NO: 2227 - DNA, 24 bp, Artificial Sequence
  Description of Artificial Sequence: Synthetic oligonucleotide
gggaccacactcttgccttcctaa

SEQ ID NO: 2228 - DNA, 24 bp, Artificial Sequence
  Description of Artificial Sequence: Synthetic oligonucleotide
gtgatcagaatgagtcagggtggt

SEQ ID NO: 2229 - DNA, 26 bp, Artificial Sequence
  Description of Artificial Sequence: Synthetic oligonucleotide
cagcagaaagatttctgtccatcaca

SEQ ID NO: 2230 - DNA, 25 bp, Artificial Sequence
  Description of Artificial Sequence: Synthetic oligonucleotide
ccagtgacaccaaggcactctacaa

SEQ ID NO: 2231 - DNA, 25 bp, Artificial Sequence
  Description of Artificial Sequence: Synthetic oligonucleotide
aaaacagagagagaggtgggaggaa

SEQ ID NO: 2232 - DNA, 26 bp, Artificial Sequence
  Description of Artificial Sequence: Synthetic oligonucleotide
ttgagagttctctgggaagcatagaa

SEQ ID NO: 2233 - DNA, 25 bp, Artificial Sequence
  Description of Artificial Sequence: Synthetic oligonucleotide
cagaggacatcactccaggacttga

SEQ ID NO: 2234 - DNA, 27 bp, Artificial Sequence
  Description of Artificial Sequence: Synthetic oligonucleotide
gaatttagtgaaatcaccagagcctga

SEQ ID NO: 2235 - DNA, 23 bp, Artificial Sequence
  Description of Artificial Sequence: Synthetic oligonucleotide
ttgtggcatggcctagaaaacaa

SEQ ID NO: 2236 - DNA, 25 bp, Artificial Sequence
  Description of Artificial Sequence: Synthetic oligonucleotide
gccaatgtgacaagctctttgtttt

SEQ ID NO: 2237 - DNA, 24 bp, Artificial Sequence
  Description of Artificial Sequence: Synthetic oligonucleotide
ccctgtggttcagcttcttgaacc

SEQ ID NO: 2238 - DNA, 25 bp, Artificial Sequence
  Description of Artificial Sequence: Synthetic oligonucleotide
ctgagaaaagcagtgatatgcccta

SEQ ID NO: 2239 - DNA, 25 bp, Artificial Sequence
  Description of Artificial Sequence: Synthetic oligonucleotide
tttgcattatgaaaatccaggtcaa

SEQ ID NO: 2240 - DNA, 26 bp, Artificial Sequence
  Description of Artificial Sequence: Synthetic oligonucleotide
tgtcaagtaactcaattcctcagcaa

SEQ ID NO: 2241 - DNA, 22 bp, Artificial Sequence
  Description of Artificial Sequence: Synthetic oligonucleotide
aggcttcaatggagcgcaaaaa

SEQ ID NO: 2242 - DNA, 22 bp, Artificial Sequence
  Description of Artificial Sequence: Synthetic oligonucleotide
attcggggtccttgacttccca

SEQ ID NO: 2243 - DNA, 22 bp, Artificial Sequence
  Description of Artificial Sequence: Synthetic oligonucleotide
cctcgccttttacccttcccta

SEQ ID NO: 2244 - DNA, 26 bp, Artificial Sequence
  Description of Artificial Sequence: Synthetic oligonucleotide
tgaaaatggacagacttaaacccaat

SEQ ID NO: 2245 - DNA, 26 bp, Artificial Sequence
  Description of Artificial Sequence: Synthetic oligonucleotide
ggagtacagtgacctgaacatggctt

SEQ ID NO: 2246 - DNA, 25 bp, Artificial Sequence
  Description of Artificial Sequence: Synthetic oligonucleotide
agaggctctagtagcagctttgcaa

SEQ ID NO: 2247 - DNA, 27 bp, Artificial Sequence
  Description of Artificial Sequence: Synthetic oligonucleotide
cagttggcatggtagaacttctaggat

SEQ ID NO: 2248 - DNA, 27 bp, Artificial Sequence
  Description of Artificial Sequence: Synthetic oligonucleotide
cgtggggtaggagaaacaggtataacc

SEQ ID NO: 2249 - DNA, 26 bp, Artificial Sequence
  Description of Artificial Sequence: Synthetic oligonucleotide
gctcaggagtgaagctacagagcttt

SEQ ID NO: 2250 - DNA, 26 bp, Artificial Sequence
  Description of Artificial Sequence: Synthetic oligonucleotide
aaaggaaaagaggctagaagggaaga

SEQ ID NO: 2251 - DNA, 27 bp, Artificial Sequence
  Description of Artificial Sequence: Synthetic oligonucleotide
ttttaacttctgtgatccctgtagcca

SEQ ID NO: 2252 - DNA, 25 bp, Artificial Sequence
  Description of Artificial Sequence: Synthetic oligonucleotide
ggggagccacatgtgagaaagtata

SEQ ID NO: 2253 - DNA, 19 bp, Artificial Sequence
  Description of Artificial Sequence: Synthetic oligonucleotide
gagggtccgccgtgctctt

SEQ ID NO: 2254 - DNA, 27 bp, Artificial Sequence
  Description of Artificial Sequence: Synthetic oligonucleotide
cactttctatctcatttcatgaggcca

SEQ ID NO: 2255 - DNA, 27 bp, Artificial Sequence
  Description of Artificial Sequence: Synthetic oligonucleotide
tctgaggccttattgtaacaaaatggt

SEQ ID NO: 2256 - DNA, 20 bp, Artificial Sequence
  Description of Artificial Sequence: Synthetic oligonucleotide
ctcacatgcaaggggaggga

SEQ ID NO: 2257 - DNA, 26 bp, Artificial Sequence
  Description of Artificial Sequence: Synthetic oligonucleotide
tctcatgtggtggttgagaaaactga

SEQ ID NO: 2258 - DNA, 23 bp, Artificial Sequence
  Description of Artificial Sequence: Synthetic oligonucleotide
tacctggaggctgccatgacact

SEQ ID NO: 2259 - DNA, 27 bp, Artificial Sequence
  Description of Artificial Sequence: Synthetic oligonucleotide
ttctagaatgtaatggacgtgcagtct

SEQ ID NO: 2260 - DNA, 26 bp, Artificial Sequence
  Description of Artificial Sequence: Synthetic oligonucleotide
gtttttcaaatcttgctagtgagcct

SEQ ID NO: 2261 - DNA, 24 bp, Artificial Sequence
  Description of Artificial Sequence: Synthetic oligonucleotide
tctctgaggagagcttgggaagga

SEQ ID NO: 2262 - DNA, 25 bp, Artificial Sequence
  Description of Artificial Sequence: Synthetic oligonucleotide
ccagacgtttatcttgctgaggctt

SEQ ID NO: 2263 - DNA, 25 bp, Artificial Sequence
  Description of Artificial Sequence: Synthetic oligonucleotide
ttaagagggagccaaagtgaggtac

SEQ ID NO: 2264 - DNA, 28 bp, Artificial Sequence
  Description of Artificial Sequence: Synthetic oligonucleotide
cccaaatgcctatcaatgaaagactaga

SEQ ID NO: 2265 - DNA, 27 bp, Artificial Sequence
  Description of Artificial Sequence: Synthetic oligonucleotide
ggacaagaaatgccacattttaaaaat

SEQ ID NO: 2266 - DNA, 28 bp, Artificial Sequence
  Description of Artificial Sequence: Synthetic oligonucleotide
gaaactgtgggagatgatgaatatttgt

SEQ ID NO: 2267 - DNA, 22 bp, Artificial Sequence
  Description of Artificial Sequence: Synthetic oligonucleotide
aagcaaacccgtccttcttcat

SEQ ID NO: 2268 - DNA, 23 bp, Artificial Sequence
  Description of Artificial Sequence: Synthetic oligonucleotide
cttgggggaagcatcaggagata

SEQ ID NO: 2269 - DNA, 27 bp, Artificial Sequence
  Description of Artificial Sequence: Synthetic oligonucleotide
tgaatttgtctaggtgttagattggct

SEQ ID NO: 2270 - DNA, 24 bp, Artificial Sequence
  Description of Artificial Sequence: Synthetic oligonucleotide
actgggtactacatctcccaggca

SEQ ID NO: 2271 - DNA, 27 bp, Artificial Sequence
  Description of Artificial Sequence: Synthetic oligonucleotide
aacaaatttgataaaatccaacaccca

SEQ ID NO: 2272 - DNA, 19 bp, Artificial Sequence
  Description of Artificial Sequence: Synthetic oligonucleotide
ccgcctggacaccgagctt

SEQ ID NO: 2273 - DNA, 26 bp, Artificial Sequence
  Description of Artificial Sequence: Synthetic oligonucleotide
aatccatgaggttcacatggacttat

SEQ ID NO: 2274 - DNA, 22 bp, Artificial Sequence
  Description of Artificial Sequence: Synthetic oligonucleotide
gagcgaaaccgcctctcaaact

SEQ ID NO: 2275 - DNA, 24 bp, Artificial Sequence
  Description of Artificial Sequence: Synthetic oligonucleotide
ctctctctccctcgtgagaaagaa

SEQ ID NO: 2276 - DNA, 20 bp, Artificial Sequence
  Description of Artificial Sequence: Synthetic oligonucleotide
ctcagccagggctgcatgca

SEQ ID NO: 2277 - DNA, 26 bp, Artificial Sequence
  Description of Artificial Sequence: Synthetic oligonucleotide
tctttgagactcaaatttgccattta

SEQ ID NO: 2278 - DNA, 19 bp, Artificial Sequence
  Description of Artificial Sequence: Synthetic oligonucleotide
acgtcgctgtcgaagcgca

SEQ ID NO: 2279 - DNA, 28 bp, Artificial Sequence
  Description of Artificial Sequence: Synthetic oligonucleotide
caaaacattttcatcaactgatcaacaa

SEQ ID NO: 2280 - DNA, 23 bp, Artificial Sequence
  Description of Artificial Sequence: Synthetic oligonucleotide
gtcaaagatcaaggcctgggaaa

SEQ ID NO: 2281 - DNA, 28 bp, Artificial Sequence
  Description of Artificial Sequence: Synthetic oligonucleotide
catcttatataagagccaacatgtgcat

SEQ ID NO: 2282 - DNA, 24 bp, Artificial Sequence
  Description of Artificial Sequence: Synthetic oligonucleotide
tcatgaccatctctatggccaatt

SEQ ID NO: 2283 - DNA, 24 bp, Artificial Sequence
  Description of Artificial Sequence: Synthetic oligonucleotide
tttcctaatggccctgatcctgtt

SEQ ID NO: 2284 - DNA, 28 bp, Artificial Sequence
  Description of Artificial Sequence: Synthetic oligonucleotide
tgtcccttaatcttgtgtgaactttttt

SEQ ID NO: 2285 - DNA, 28 bp, Artificial Sequence
  Description of Artificial Sequence: Synthetic oligonucleotide
ggagagtgatctattggttaggagcaca

SEQ ID NO: 2286 - DNA, 21 bp, Artificial Sequence
  Description of Artificial Sequence: Synthetic oligonucleotide
ttggggttttgagccgcagta

SEQ ID NO: 2287 - DNA, 27 bp, Artificial Sequence
  Description of Artificial Sequence: Synthetic oligonucleotide
ttattttaaggaagtgaaaccccttca

SEQ ID NO: 2288 - DNA, 18 bp, Artificial Sequence
  Description of Artificial Sequence: Synthetic oligonucleotide
cccggagcagccctgatt

SEQ ID NO: 2289 - DNA, 27 bp, Artificial Sequence
  Description of Artificial Sequence: Synthetic oligonucleotide
tgacagtgttgaaagattccagttaaa

SEQ ID NO: 2290 - DNA, 29 bp, Artificial Sequence
  Description of Artificial Sequence: Synthetic oligonucleotide
ggaagttgtggtctgctattggttataat

SEQ ID NO: 2291 - DNA, 27 bp, Artificial Sequence
  Description of Artificial Sequence: Synthetic oligonucleotide
gccagtgattattccactctctactga

SEQ ID NO: 2292 - DNA, 18 bp, Artificial Sequence
  Description of Artificial Sequence: Synthetic oligonucleotide
gcctgctgcccagccact

SEQ ID NO: 2293 - DNA, 27 bp, Artificial Sequence
  Description of Artificial Sequence: Synthetic oligonucleotide
agaagagaactaaatggacagagggat

SEQ ID NO: 2294 - DNA, 22 bp, Artificial Sequence
  Description of Artificial Sequence: Synthetic oligonucleotide
gaaaagactgtggtccggtgga

SEQ ID NO: 2295 - DNA, 21 bp, Artificial Sequence
  Description of Artificial Sequence: Synthetic oligonucleotide
ttagttctcccgggccagcca

SEQ ID NO: 2296 - DNA, 24 bp, Artificial Sequence
  Description of Artificial Sequence: Synthetic oligonucleotide
aggccatcgccaatcattgtatat

SEQ ID NO: 2297 - DNA, 22 bp, Artificial Sequence
  Description of Artificial Sequence: Synthetic oligonucleotide
gagttgtctgcatttcccccaa

SEQ ID NO: 2298 - DNA, 29 bp, Artificial Sequence
  Description of Artificial Sequence: Synthetic oligonucleotide
gccaactttcaatgttaattagttgtggt

SEQ ID NO: 2299 - DNA, 27 bp, Artificial Sequence
  Description of Artificial Sequence: Synthetic oligonucleotide
agtcatttttccacatcatttgactat

SEQ ID NO: 2300 - DNA, 28 bp, Artificial Sequence
  Description of Artificial Sequence: Synthetic oligonucleotide
tcaacatgctcccttaagtaattctgat

SEQ ID NO: 2301 - DNA, 21 bp, Artificial Sequence
  Description of Artificial Sequence: Synthetic oligonucleotide
cagccctcaggtgagtgggac

SEQ ID NO: 2302 - DNA, 23 bp, Artificial Sequence
  Description of Artificial Sequence: Synthetic oligonucleotide
gaacatcaatggatcggtgtgaa

SEQ ID NO: 2303 - DNA, 27 bp, Artificial Sequence
  Description of Artificial Sequence: Synthetic oligonucleotide
cagctcacaaaacagaatagttcagta

SEQ ID NO: 2304 - DNA, 19 bp, Artificial Sequence
  Description of Artificial Sequence: Synthetic oligonucleotide
agctgctgcgagggtccgt

SEQ ID NO: 2305 - DNA, 24 bp, Artificial Sequence
  Description of Artificial Sequence: Synthetic oligonucleotide
caccaatatcatccccccaaaatt

SEQ ID NO: 2306 - DNA, 24 bp, Artificial Sequence
  Description of Artificial Sequence: Synthetic oligonucleotide
aaagtggacacaccatgactggaa

SEQ ID NO: 2307 - DNA, 24 bp, Artificial Sequence
  Description of Artificial Sequence: Synthetic oligonucleotide
ccctcctaccccaactgctagaaa

SEQ ID NO: 2308 - DNA, 24 bp, Artificial Sequence
  Description of Artificial Sequence: Synthetic oligonucleotide
cctgttccaacaagtctgttggga

SEQ ID NO: 2309 - DNA, 22 bp, Artificial Sequence
  Description of Artificial Sequence: Synthetic oligonucleotide
cgtaggcacccaagggaatcta

SEQ ID NO: 2310 - DNA, 20 bp, Artificial Sequence
  Description of Artificial Sequence: Synthetic oligonucleotide
cccaccggggtcaaggaact

SEQ ID NO: 2311 - DNA, 20 bp, Artificial Sequence
  Description of Artificial Sequence: Synthetic oligonucleotide
ccagctgcttgcccaggtca

SEQ ID NO: 2312 - DNA, 22 bp, Artificial Sequence
  Description of Artificial Sequence: Synthetic oligonucleotide
cttgctggagatgctgcagaga

SEQ ID NO: 2313 - DNA, 21 bp, Artificial Sequence
  Description of Artificial Sequence: Synthetic oligonucleotide
cccaaatccttccacagggat

SEQ ID NO: 2314 - DNA, 25 bp, Artificial Sequence
  Description of Artificial Sequence: Synthetic oligonucleotide
tgttatcacaactgtgcagcctcct

SEQ ID NO: 2315 - DNA, 21 bp, Artificial Sequence
  Description of Artificial Sequence: Synthetic oligonucleotide
caaatggcggctccatcttct

SEQ ID NO: 2316 - DNA, 27 bp, Artificial Sequence
  Description of Artificial Sequence: Synthetic oligonucleotide
tgcatgattatatgtgtttgcaaaaaa

SEQ ID NO: 2317 - DNA, 18 bp, Artificial Sequence
  Description of Artificial Sequence: Synthetic oligonucleotide
gcccggtgtccaccgtga

SEQ ID NO: 2318 - DNA, 21 bp, Artificial Sequence
  Description of Artificial Sequence: Synthetic oligonucleotide
accagtaacggtcgcgaccca

SEQ ID NO: 2319 - DNA, 29 bp, Artificial Sequence
  Description of Artificial Sequence: Synthetic oligonucleotide
tttctagacagttgccttatcaaatacca

SEQ ID NO: 2320 - DNA, 27 bp, Artificial Sequence
  Description of Artificial Sequence: Synthetic oligonucleotide
cagccaacaaacataggaaaaaattct

SEQ ID NO: 2321 - DNA, 29 bp, Artificial Sequence
  Description of Artificial Sequence: Synthetic oligonucleotide
aaattaattaggatgacacatgatggata

SEQ ID NO: 2322 - DNA, 22 bp, Artificial Sequence
  Description of Artificial Sequence: Synthetic oligonucleotide
actttcttccgcctggccagag

SEQ ID NO: 2323 - DNA, 22 bp, Artificial Sequence
  Description of Artificial Sequence: Synthetic oligonucleotide
cccatccttaccggagtgtgca

SEQ ID NO: 2324 - DNA, 20 bp, Artificial Sequence
  Description of Artificial Sequence: Synthetic oligonucleotide
ggggcagatgggatgctcaa

SEQ ID NO: 2325 - DNA, 21 bp, Artificial Sequence
  Description of Artificial Sequence: Synthetic oligonucleotide
ggctcctcgaggacagggact

SEQ ID NO: 2326 - DNA, 29 bp, Artificial Sequence
  Description of Artificial Sequence: Synthetic oligonucleotide
aagcacttgcttatatgttattctctcca

SEQ ID NO: 2327 - DNA, 26 bp, Artificial Sequence
  Description of Artificial Sequence: Synthetic oligonucleotide
tcattcagtgtcataagtcagtgcat

SEQ ID NO: 2328 - DNA, 26 bp, Artificial Sequence
  Description of Artificial Sequence: Synthetic oligonucleotide
tctttgctttcactatcctatggcct

SEQ ID NO: 2329 - DNA, 27 bp, Artificial Sequence
  Description of Artificial Sequence: Synthetic oligonucleotide
tcacagctttgcctctttttttttttt

SEQ ID NO: 2330 - DNA, 21 bp, Artificial Sequence
  Description of Artificial Sequence: Synthetic oligonucleotide
ccctagcagggagctgagcaa

SEQ ID NO: 2331 - DNA, 28 bp, Artificial Sequence
  Description of Artificial Sequence: Synthetic oligonucleotide
tcttaactgaaatccaagttccaataaa

SEQ ID NO: 2332 - DNA, 25 bp, Artificial Sequence
  Description of Artificial Sequence: Synthetic oligonucleotide
aggcaacaaccttgatcttggactt

SEQ ID NO: 2333 - DNA, 19 bp, Artificial Sequence
  Description of Artificial Sequence: Synthetic oligonucleotide
ggaaccgcaccaactggca

SEQ ID NO: 2334 - DNA, 30 bp, Artificial Sequence
  Description of Artificial Sequence: Synthetic oligonucleotide
tgatttcttaaggtaagtttcacattccta

SEQ ID NO: 2335 - DNA, 21 bp, Artificial Sequence
  Description of Artificial Sequence: Synthetic oligonucleotide
cagaggccttttcccctccca

SEQ ID NO: 2336 - DNA, 30 bp, Artificial Sequence
  Description of Artificial Sequence: Synthetic oligonucleotide
aaaatattgaaaatctcagctcaaaataat

SEQ ID NO: 2337 - DNA, 18 bp, Artificial Sequence
  Description of Artificial Sequence: Synthetic oligonucleotide
ccccgggcttcttgcact

SEQ ID NO: 2338 - DNA, 29 bp, Artificial Sequence
  Description of Artificial Sequence: Synthetic oligonucleotide
ttgctgtgcagcatattcttatatacata

SEQ ID NO: 2339 - DNA, 29 bp, Artificial Sequence
  Description of Artificial Sequence: Synthetic oligonucleotide
cacaaaagaaataaataaaaggcatccaa

SEQ ID NO: 2340 - DNA, 30 bp, Artificial Sequence
  Description of Artificial Sequence: Synthetic oligonucleotide
catctttttcaagagtcaagattacaatat

SEQ ID NO: 2341 - DNA, 19 bp, Artificial Sequence
  Description of Artificial Sequence: Synthetic oligonucleotide
agaggctcctcggggggct

SEQ ID NO: 2342 - DNA, 20 bp, Artificial Sequence
  Description of Artificial Sequence: Synthetic oligonucleotide
ccctgctctctgtcggctcc

SEQ ID NO: 2343 - DNA, 28 bp, Artificial Sequence
  Description of Artificial Sequence: Synthetic oligonucleotide
agaaatttgacaaaagattacaggaact

SEQ ID NO: 2344 - DNA, 21 bp, Artificial Sequence
  Description of Artificial Sequence: Synthetic oligonucleotide
gaggcccaaggcaacagttct

SEQ ID NO: 2345 - DNA, 29 bp, Artificial Sequence
  Description of Artificial Sequence: Synthetic oligonucleotide
gcatggtgctatatttattgatgatgatt

SEQ ID NO: 2346 - DNA, 21 bp, Artificial Sequence
  Description of Artificial Sequence: Synthetic oligonucleotide
ccaagaacacaggcctccccg

SEQ ID NO: 2347 - DNA, 25 bp, Artificial Sequence
  Description of Artificial Sequence: Synthetic oligonucleotide
ggaagggacaacatgtaagctcaga

SEQ ID NO: 2348 - DNA, 26 bp, Artificial Sequence
  Description of Artificial Sequence: Synthetic oligonucleotide
tcccaattccctagttgttttttcta

SEQ ID NO: 2349 - DNA, 22 bp, Artificial Sequence
  Description of Artificial Sequence: Synthetic oligonucleotide
ccgggcagaacctaactcctct

SEQ ID NO: 2350 - DNA, 22 bp, Artificial Sequence
  Description of Artificial Sequence: Synthetic oligonucleotide
catctcgagcctccgttcaaaa

SEQ ID NO: 2351 - DNA, 23 bp, Artificial Sequence
  Description of Artificial Sequence: Synthetic oligonucleotide
ggggacaaggcaacatacctcaa

SEQ ID NO: 2352 - DNA, 24 bp, Artificial Sequence
  Description of Artificial Sequence: Synthetic oligonucleotide
tccctccctccacatatacatgca

SEQ ID NO: 2353 - DNA, 22 bp, Artificial Sequence
  Description of Artificial Sequence: Synthetic oligonucleotide
ccgtgagaaaaggaggagccca

SEQ ID NO: 2354 - DNA, 25 bp, Artificial Sequence
  Description of Artificial Sequence: Synthetic oligonucleotide
tcacaaggaccagagctgtttagca

SEQ ID NO: 2355 - DNA, 25 bp, Artificial Sequence
  Description of Artificial Sequence: Synthetic oligonucleotide
tcattgtcacaacctagctggaact

SEQ ID NO: 2356 - DNA, 25 bp, Artificial Sequence
  Description of Artificial Sequence: Synthetic oligonucleotide
gacagcatgaacagaagtgaggaca

SEQ ID NO: 2357 - DNA, 23 bp, Artificial Sequence
  Description of Artificial Sequence: Synthetic oligonucleotide
cccaacgatcctgctgttcaact

SEQ ID NO: 2358 - DNA, 27 bp, Artificial Sequence
  Description of Artificial Sequence: Synthetic oligonucleotide
tgtgatgatagggttacacatctgctt

SEQ ID NO: 2359 - DNA, 22 bp, Artificial Sequence
  Description of Artificial Sequence: Synthetic oligonucleotide
caatgtcatcgatcccctggat

SEQ ID NO: 2360 - DNA, 26 bp, Artificial Sequence
  Description of Artificial Sequence: Synthetic oligonucleotide
tgtattttttttaacaagcagcccat

SEQ ID NO: 2361 - DNA, 22 bp, Artificial Sequence
  Description of Artificial Sequence: Synthetic oligonucleotide
atgggaccttctggctgcctac

SEQ ID NO: 2362 - DNA, 20 bp, Artificial Sequence
  Description of Artificial Sequence: Synthetic oligonucleotide
gcgctgagtctgaggggaaa

SEQ ID NO: 2363 - DNA, 22 bp, Artificial Sequence
  Description of Artificial Sequence: Synthetic oligonucleotide
tggtggggctctactcaccagt

SEQ ID NO: 2364 - DNA, 20 bp, Artificial Sequence
  Description of Artificial Sequence: Synthetic oligonucleotide
gccctgggagcagggaaaca

SEQ ID NO: 2365 - DNA, 18 bp, Artificial Sequence
  Description of Artificial Sequence: Synthetic oligonucleotide
ctggggcgaggaggcaga

SEQ ID NO: 2366 - DNA, 22 bp, Artificial Sequence
  Description of Artificial Sequence: Synthetic oligonucleotide
taggcctcgtcatcctcgtcca

SEQ ID NO: 2367 - DNA, 24 bp, Artificial Sequence
  Description of Artificial Sequence: Synthetic oligonucleotide
ttttcagcaaacacctttttcccc

SEQ ID NO: 2368 - DNA, 25 bp, Artificial Sequence
  Description of Artificial Sequence: Synthetic oligonucleotide
tgcaaaattgccttcatagaggctg

SEQ ID NO: 2369 - DNA, 22 bp, Artificial Sequence
  Description of Artificial Sequence: Synthetic oligonucleotide
gaggccagagcaaatttccccg

SEQ ID NO: 2370 - DNA, 24 bp, Artificial Sequence
  Description of Artificial Sequence: Synthetic oligonucleotide
cttggatttcccacaatatggctg

SEQ ID NO: 2371 - DNA, 24 bp, Artificial Sequence
  Description of Artificial Sequence: Synthetic oligonucleotide
tgggataacagctgaactgggatg

SEQ ID NO: 2372 - DNA, 25 bp, Artificial Sequence
  Description of Artificial Sequence: Synthetic oligonucleotide
agcagacactggtaggaacaaggag

SEQ ID NO: 2373 - DNA, 23 bp, Artificial Sequence
  Description of Artificial Sequence: Synthetic oligonucleotide
tctgggggcagcatttctagtta

SEQ ID NO: 2374 - DNA, 23 bp, Artificial Sequence
  Description of Artificial Sequence: Synthetic oligonucleotide
tatgccaggcacgatgctgaatg

SEQ ID NO: 2375 - DNA, 23 bp, Artificial Sequence
  Description of Artificial Sequence: Synthetic oligonucleotide
gggaaggactgagagtcccattt

SEQ ID NO: 2376 - DNA, 22 bp, Artificial Sequence
  Description of Artificial Sequence: Synthetic oligonucleotide
aatcttggcatccctccctccg

SEQ ID NO: 2377 - DNA, 25 bp, Artificial Sequence
  Description of Artificial Sequence: Synthetic oligonucleotide
tgaggttcactgagatttgttggcg

SEQ ID NO: 2378 - DNA, 26 bp, Artificial Sequence
  Description of Artificial Sequence: Synthetic oligonucleotide
aaggaaagaacagagcagcagaatct

SEQ ID NO: 2379 - DNA, 20 bp, Artificial Sequence
  Description of Artificial Sequence: Synthetic oligonucleotide
ccctgcgagttgaggcatgg

SEQ ID NO: 2380 - DNA, 24 bp, Artificial Sequence
  Description of Artificial Sequence: Synthetic oligonucleotide
ttcccctttatcccctgctaatcg

SEQ ID NO: 2381 - DNA, 24 bp, Artificial Sequence
  Description of Artificial Sequence: Synthetic oligonucleotide
tggatttggcaacatggagctaac

SEQ ID NO: 2382 - DNA, 23 bp, Artificial Sequence
  Description of Artificial Sequence: Synthetic oligonucleotide
acaggaagcaaagggaagctccg

SEQ ID NO: 2383 - DNA, 24 bp, Artificial Sequence
  Description of Artificial Sequence: Synthetic oligonucleotide
caaagttgtcctgggttgactcag

SEQ ID NO: 2384 - DNA, 26 bp, Artificial Sequence
  Description of Artificial Sequence: Synthetic oligonucleotide
gataatcaggaagggcaaggttatgc

SEQ ID NO: 2385 - DNA, 25 bp, Artificial Sequence
  Description of Artificial Sequence: Synthetic oligonucleotide
ttccagtcctttctgtggaaagaac

SEQ ID NO: 2386 - DNA, 27 bp, Artificial Sequence
  Description of Artificial Sequence: Synthetic oligonucleotide
cctccctgttggttactcttcatctcg

SEQ ID NO: 2387 - DNA, 25 bp, Artificial Sequence
  Description of Artificial Sequence: Synthetic oligonucleotide
ggtgagggaatgccagtttatgttc

SEQ ID NO: 2388 - DNA, 25 bp, Artificial Sequence
  Description of Artificial Sequence: Synthetic oligonucleotide
caaggacattttgtgctggattaag

SEQ ID NO: 2389 - DNA, 22 bp, Artificial Sequence
  Description of Artificial Sequence: Synthetic oligonucleotide
gaacaaagggttaaagggcgcc

SEQ ID NO: 2390 - DNA, 26 bp, Artificial Sequence
  Description of Artificial Sequence: Synthetic oligonucleotide
tctctgcatatcaccatcattgtccc

SEQ ID NO: 2391 - DNA, 24 bp, Artificial Sequence
  Description of Artificial Sequence: Synthetic oligonucleotide
tgcctgcttccttttcaaattcag

SEQ ID NO: 2392 - DNA, 23 bp, Artificial Sequence
  Description of Artificial Sequence: Synthetic oligonucleotide
gggtggtaacccagccactctta

SEQ ID NO: 2393 - DNA, 22 bp, Artificial Sequence
  Description of Artificial Sequence: Synthetic oligonucleotide
ggggtgggacacagagtggaag

SEQ ID NO: 2394 - DNA, 23 bp, Artificial Sequence
  Description of Artificial Sequence: Synthetic oligonucleotide
atagcaggcagcctgggttttcg

SEQ ID NO: 2395 - DNA, 25 bp, Artificial Sequence
  Description of Artificial Sequence: Synthetic oligonucleotide
ccttgagtcatggaggaatccagtc

SEQ ID NO: 2396 - DNA, 26 bp, Artificial Sequence
  Description of Artificial Sequence: Synthetic oligonucleotide
ggttcatgcaaaaaagcaacattagc

SEQ ID NO: 2397 - DNA, 27 bp, Artificial Sequence
  Description of Artificial Sequence: Synthetic oligonucleotide
gggcaagtaaggagactgatacgaagg

SEQ ID NO: 2398 - DNA, 21 bp, Artificial Sequence
  Description of Artificial Sequence: Synthetic oligonucleotide
ccgaggctctggcactcactg

SEQ ID NO: 2399 - DNA, 27 bp, Artificial Sequence
  Description of Artificial Sequence: Synthetic oligonucleotide
cctttggtgaaaataaacacacatggc

SEQ ID NO: 2400 - DNA, 24 bp, Artificial Sequence
  Description of Artificial Sequence: Synthetic oligonucleotide
caaggaaaggagtcaggggctaac

SEQ ID NO: 2401 - DNA, 21 bp, Artificial Sequence
  Description of Artificial Sequence: Synthetic oligonucleotide
gtgtgaaggaacctggcccac

SEQ ID NO: 2402 - DNA, 27 bp, Artificial Sequence
  Description of Artificial Sequence: Synthetic oligonucleotide
tgatcttattccagaccagcgatactc

SEQ ID NO: 2403 - DNA, 24 bp, Artificial Sequence
  Description of Artificial Sequence: Synthetic oligonucleotide
caaccccaatcccacaggtttaag

SEQ ID NO: 2404 - DNA, 24 bp, Artificial Sequence
  Description of Artificial Sequence: Synthetic oligonucleotide
tctgcagagccatcttccaagacg

SEQ ID NO: 2405 - DNA, 24 bp, Artificial Sequence
  Description of Artificial Sequence: Synthetic oligonucleotide
tcttgatctctgccatctggaggg

SEQ ID NO: 2406 - DNA, 24 bp, Artificial Sequence
  Description of Artificial Sequence: Synthetic oligonucleotide
aacaactttggcatctctccagac

SEQ ID NO: 2407 - DNA, 25 bp, Artificial Sequence
  Description of Artificial Sequence: Synthetic oligonucleotide
ttgtgcataagctacaagagctgac

SEQ ID NO: 2408 - DNA, 27 bp, Artificial Sequence
  Description of Artificial Sequence: Synthetic oligonucleotide
tggttgaaagatgttttgagagctctc

SEQ ID NO: 2409 - DNA, 21 bp, Artificial Sequence
  Description of Artificial Sequence: Synthetic oligonucleotide
cagacagtgagctcgccctgg

SEQ ID NO: 2410 - DNA, 22 bp, Artificial Sequence
  Description of Artificial Sequence: Synthetic oligonucleotide
agagtcccaggcgcctttaccc

SEQ ID NO: 2411 - DNA, 24 bp, Artificial Sequence
  Description of Artificial Sequence: Synthetic oligonucleotide
ttgcagaaaggttgtggaaaagag

SEQ ID NO: 2412 - DNA, 20 bp, Artificial Sequence
  Description of Artificial Sequence: Synthetic oligonucleotide
cgtccagtgtcacaggggcc

SEQ ID NO: 2413 - DNA, 27 bp, Artificial Sequence
  Description of Artificial Sequence: Synthetic oligonucleotide
tcaaaagagttgcctatactccctgac

SEQ ID NO: 2414 - DNA, 19 bp, Artificial Sequence
  Description of Artificial Sequence: Synthetic oligonucleotide
cactcccattgggcgtcgc

SEQ ID NO: 2415 - DNA, 23 bp, Artificial Sequence
  Description of Artificial Sequence: Synthetic oligonucleotide
gcttcccttcccattcaacacac

SEQ ID NO: 2416 - DNA, 21 bp, Artificial Sequence
  Description of Artificial Sequence: Synthetic oligonucleotide
aggctccctgtgatggagtcg

SEQ ID NO: 2417 - DNA, 24 bp, Artificial Sequence
  Description of Artificial Sequence: Synthetic oligonucleotide
tcattgagctcataccacatgccg

SEQ ID NO: 2418 - DNA, 24 bp, Artificial Sequence
  Description of Artificial Sequence: Synthetic oligonucleotide
ccagcatctcatacaccaccatgc

SEQ ID NO: 2419 - DNA, 19 bp, Artificial Sequence
  Description of Artificial Sequence: Synthetic oligonucleotide
ggagccgaaaagggcggtg

SEQ ID NO: 2420 - DNA, 26 bp, Artificial Sequence
  Description of Artificial Sequence: Synthetic oligonucleotide
tgcacaccacctagattctgtcaaag

SEQ ID NO: 2421 - DNA, 23 bp, Artificial Sequence
  Description of Artificial Sequence: Synthetic oligonucleotide
ggcctctactcactctcccccag

SEQ ID NO: 2422 - DNA, 24 bp, Artificial Sequence
  Description of Artificial Sequence: Synthetic oligonucleotide
ggattttccaactcgaaggatgac

SEQ ID NO: 2423 - DNA, 24 bp, Artificial Sequence
  Description of Artificial Sequence: Synthetic oligonucleotide
gcaccttgccacctgaaacttacc

SEQ ID NO: 2424 - DNA, 23 bp, Artificial Sequence
  Description of Artificial Sequence: Synthetic oligonucleotide
ccactggtggggtgaacttgtcg

SEQ ID NO: 2425 - DNA, 19 bp, Artificial Sequence
  Description of Artificial Sequence: Synthetic oligonucleotide
atgggctcaggagccccag

SEQ ID NO: 2426 - DNA, 29 bp, Artificial Sequence
  Description of Artificial Sequence: Synthetic oligonucleotide
gccagaaatacaccacctacagtacaaac

SEQ ID NO: 2427 - DNA, 23 bp, Artificial Sequence
  Description of Artificial Sequence: Synthetic oligonucleotide
gggagggtgggaggaagatcttc

SEQ ID NO: 2428 - DNA, 26 bp, Artificial Sequence
  Description of Artificial Sequence: Synthetic oligonucleotide
agcaataaaaagtaggaagccaaaac

SEQ ID NO: 2429 - DNA, 22 bp, Artificial Sequence
  Description of Artificial Sequence: Synthetic oligonucleotide
ctgcagaagcttgcccagctcc

SEQ ID NO: 2430 - DNA, 25 bp, Artificial Sequence
  Description of Artificial Sequence: Synthetic oligonucleotide
tttcacggtgtctcatttttcctcc

SEQ ID NO: 2431 - DNA, 21 bp, Artificial Sequence
  Description of Artificial Sequence: Synthetic oligonucleotide
gtgacagtttggccgttgcgc

SEQ ID NO: 2432 - DNA, 20 bp, Artificial Sequence
  Description of Artificial Sequence: Synthetic oligonucleotide
agttgagcaatccggggggc

SEQ ID NO: 2433 - DNA, 28 bp, Artificial Sequence
  Description of Artificial Sequence: Synthetic oligonucleotide
ggatttagactttctgaggtactcccac

SEQ ID NO: 2434 - DNA, 26 bp, Artificial Sequence
  Description of Artificial Sequence: Synthetic oligonucleotide
tttgacttgttttggtttggtttccg

SEQ ID NO: 2435 - DNA, 27 bp, Artificial Sequence
  Description of Artificial Sequence: Synthetic oligonucleotide
ctctgcgtggtaggtaaattttatgtc

SEQ ID NO: 2436 - DNA, 23 bp, Artificial Sequence
  Description of Artificial Sequence: Synthetic oligonucleotide
tcagttgcaaagtcatacccggc

SEQ ID NO: 2437 - DNA, 23 bp, Artificial Sequence
  Description of Artificial Sequence: Synthetic oligonucleotide
gagtggcattgcagccttcctac

SEQ ID NO: 2438 - DNA, 28 bp, Artificial Sequence
  Description of Artificial Sequence: Synthetic oligonucleotide
tttcacttacttttgagtcttccttccc

SEQ ID NO: 2439 - DNA, 23 bp, Artificial Sequence
  Description of Artificial Sequence: Synthetic oligonucleotide
agtgtctcaattcctttgcccac

SEQ ID NO: 2440 - DNA, 25 bp, Artificial Sequence
  Description of Artificial Sequence: Synthetic oligonucleotide
agagatttcccagaactccgataag

SEQ ID NO: 2441 - DNA, 20 bp, Artificial Sequence
  Description of Artificial Sequence: Synthetic oligonucleotide
gctgcattgcttttgcgcac

SEQ ID NO: 2442 - DNA, 23 bp, Artificial Sequence
  Description of Artificial Sequence: Synthetic oligonucleotide
ccattttcttcttgggcgctctg

SEQ ID NO: 2443 - DNA, 22 bp, Artificial Sequence
  Description of Artificial Sequence: Synthetic oligonucleotide
ttgacagatttgccggcttccc

SEQ ID NO: 2444 - DNA, 23 bp, Artificial Sequence
  Description of Artificial Sequence: Synthetic oligonucleotide
tctaaccccatctgctcccctcc

SEQ ID NO: 2445 - DNA, 21 bp, Artificial Sequence
  Description of Artificial Sequence: Synthetic oligonucleotide
ctgcccctacccagcagtgac

SEQ ID NO: 2446 - DNA, 21 bp, Artificial Sequence
  Description of Artificial Sequence: Synthetic oligonucleotide
gccagagaaaaggggtgggac

SEQ ID NO: 2447 - DNA, 22 bp, Artificial Sequence
  Description of Artificial Sequence: Synthetic oligonucleotide
agtggggtcttggggcagtagc

SEQ ID NO: 2448 - DNA, 20 bp, Artificial Sequence
  Description of Artificial Sequence: Synthetic oligonucleotide
gaggtccattgacgcctggg

SEQ ID NO: 2449 - DNA, 18 bp, Artificial Sequence
  Description of Artificial Sequence: Synthetic oligonucleotide
atgctcctgcccctgccc

SEQ ID NO: 2450 - DNA, 22 bp, Artificial Sequence
  Description of Artificial Sequence: Synthetic oligonucleotide
gacacagagatgccgtggaaag

SEQ ID NO: 2451 - DNA, 22 bp, Artificial Sequence
  Description of Artificial Sequence: Synthetic oligonucleotide
ctccagctgtggcagtacagcc

SEQ ID NO: 2452 - DNA, 28 bp, Artificial Sequence
  Description of Artificial Sequence: Synthetic oligonucleotide
tgaagtaagtcaaatttggtttagaggg

SEQ ID NO: 2453 - DNA, 20 bp, Artificial Sequence
  Description of Artificial Sequence: Synthetic oligonucleotide
gggtcctggctgtgaggctg

SEQ ID NO: 2454 - DNA, 21 bp, Artificial Sequence
  Description of Artificial Sequence: Synthetic oligonucleotide
cgctcgatgcagtcacaatgc

SEQ ID NO: 2455 - DNA, 28 bp, Artificial Sequence
  Description of Artificial Sequence: Synthetic oligonucleotide
aaccgtttacttagaagacccagataag

SEQ ID NO: 2456 - DNA, 24 bp, Artificial Sequence
  Description of Artificial Sequence: Synthetic oligonucleotide
ttagagcaatttccaacccttgcc

SEQ ID NO: 2457 - DNA, 19 bp, Artificial Sequence
  Description of Artificial Sequence: Synthetic oligonucleotide
agctgctccggttccccag

SEQ ID NO: 2458 - DNA, 21 bp, Artificial Sequence
  Description of Artificial Sequence: Synthetic oligonucleotide
cccagcagccgaatgatgttg

SEQ ID NO: 2459 - DNA, 28 bp, Artificial Sequence
  Description of Artificial Sequence: Synthetic oligonucleotide
agttggaataagcccactatagtctgtg

SEQ ID NO: 2460 - DNA, 22 bp, Artificial Sequence
  Description of Artificial Sequence: Synthetic oligonucleotide
gagggcgatattctggtggtgg

SEQ ID NO: 2461 - DNA, 22 bp, Artificial Sequence
  Description of Artificial Sequence: Synthetic oligonucleotide
aggtgctgaggaaagctcccag

SEQ ID NO: 2462 - DNA, 19 bp, Artificial Sequence
  Description of Artificial Sequence: Synthetic oligonucleotide
ggtcaggtgctgaggcgcc

SEQ ID NO: 2463 - DNA, 24 bp, Artificial Sequence
  Description of Artificial Sequence: Synthetic oligonucleotide
tggagtcttgcctttgctctcctc

SEQ ID NO: 2464 - DNA, 21 bp, Artificial Sequence
  Description of Artificial Sequence: Synthetic oligonucleotide
cagagggaggggagctaccac

SEQ ID NO: 2465 - DNA, 19 bp, Artificial Sequence
  Description of Artificial Sequence: Synthetic oligonucleotide
accggtggcgggttctcag

SEQ ID NO: 2466 - DNA, 19 bp, Artificial Sequence
  Description of Artificial Sequence: Synthetic oligonucleotide
ggcactgagcacgcagggg

SEQ ID NO: 2467 - DNA, 20 bp, Artificial Sequence
  Description of Artificial Sequence: Synthetic oligonucleotide
gaacaaagtgggcgtccgcg

SEQ ID NO: 2468 - DNA, 28 bp, Artificial Sequence
  Description of Artificial Sequence: Synthetic oligonucleotide
tcgcttatatactggagaggctaggagc

SEQ ID NO: 2469 - DNA, 26 bp, Artificial Sequence
  Description of Artificial Sequence: Synthetic oligonucleotide
caacacctctgcaatcaagaactgag

SEQ ID NO: 2470 - DNA, 30 bp, Artificial Sequence
  Description of Artificial Sequence: Synthetic oligonucleotide
tggatttcatctctcaataattctgcttac

SEQ ID NO: 2471 - DNA, 30 bp, Artificial Sequence
  Description of Artificial Sequence: Synthetic oligonucleotide
gacatctttctactcagttaccattaggag

SEQ ID NO: 2472 - DNA, 21 bp, Artificial Sequence
  Description of Artificial Sequence: Synthetic oligonucleotide
cagaggcactggaaggagccc

SEQ ID NO: 2473 - DNA, 22 bp, Artificial Sequence
  Description of Artificial Sequence: Synthetic oligonucleotide
atgtggaggtggaatgcccacg

SEQ ID NO: 2474 - DNA, 20 bp, Artificial Sequence
  Description of Artificial Sequence: Synthetic oligonucleotide
ggccagatcccttccccacg

SEQ ID NO: 2475 - DNA, 29 bp, Artificial Sequence
  Description of Artificial Sequence: Synthetic oligonucleotide
gcacctcgtatttttatcaagagacattg

SEQ ID NO: 2476 - DNA, 29 bp, Artificial Sequence
  Description of Artificial Sequence: Synthetic oligonucleotide
tgcaaattgaagagatgtttaacagttag

SEQ ID NO: 2477 - DNA, 26 bp, Artificial Sequence
  Description of Artificial Sequence: Synthetic oligonucleotide
caggatccaaacagtgatcagttccc

SEQ ID NO: 2478 - DNA, 21 bp, Artificial Sequence
  Description of Artificial Sequence: Synthetic oligonucleotide
tgcagcatggaccactgctcg

SEQ ID NO: 2479 - DNA, 25 bp, Artificial Sequence
  Description of Artificial Sequence: Synthetic oligonucleotide
tcctgtgttaatagagggctccacg

SEQ ID NO: 2480 - DNA, 21 bp, Artificial Sequence
  Description of Artificial Sequence: Synthetic oligonucleotide
gtcgctgctgtgctgtggagg

SEQ ID NO: 2481 - DNA, 27 bp, Artificial Sequence
  Description of Artificial Sequence: Synthetic oligonucleotide
ggagattcgtagaaactggcaaacttc

SEQ ID NO: 2482 - DNA, 20 bp, Artificial Sequence
  Description of Artificial Sequence: Synthetic oligonucleotide
ccctctgccctccctgttgc

SEQ ID NO: 2483 - DNA, 23 bp, Artificial Sequence
  Description of Artificial Sequence: Synthetic oligonucleotide
caacctttctggccagaggaacg

SEQ ID NO: 2484 - DNA, 25 bp, Artificial Sequence
  Description of Artificial Sequence: Synthetic oligonucleotide
tctgtccttcattttcacaggagcc

SEQ ID NO: 2485 - DNA, 28 bp, Artificial Sequence
  Description of Artificial Sequence: Synthetic oligonucleotide
cattctattaacagccaaacaggaagac

SEQ ID NO: 2486 - DNA, 24 bp, Artificial Sequence
  Description of Artificial Sequence: Synthetic oligonucleotide
tctcagaggaaatgggtccacagg

SEQ ID NO: 2487 - DNA, 20 bp, Artificial Sequence
  Description of Artificial Sequence: Synthetic oligonucleotide
gcctcttccctttgcagggc

SEQ ID NO: 2488 - DNA, 28 bp, Artificial Sequence
  Description of Artificial Sequence: Synthetic oligonucleotide
gatgagaggaaggaatatttgaaacacg

SEQ ID NO: 2489 - DNA, 23 bp, Artificial Sequence
  Description of Artificial Sequence: Synthetic oligonucleotide
ctggtctggtctccacaagctcg

SEQ ID NO: 2490 - DNA, 22 bp, Artificial Sequence
  Description of Artificial Sequence: Synthetic oligonucleotide
gtgttccatcacctggggaacc

SEQ ID NO: 2491 - DNA, 24 bp, Artificial Sequence
  Description of Artificial Sequence: Synthetic oligonucleotide
gctcctcttggcagtgactagggg

SEQ ID NO: 2492 - DNA, 25 bp, Artificial Sequence
  Description of Artificial Sequence: Synthetic oligonucleotide
gatagcaggagacctcgtcagagag

SEQ ID NO: 2493 - DNA, 20 bp, Artificial Sequence
  Description of Artificial Sequence: Synthetic oligonucleotide
cactcccattgggtgtcggg

SEQ ID NO: 2494 - DNA, 25 bp, Artificial Sequence
  Description of Artificial Sequence: Synthetic oligonucleotide
gactacagctgcaaggacaaccagg

SEQ ID NO: 2495 - DNA, 20 bp, Artificial Sequence
  Description of Artificial Sequence: Synthetic oligonucleotide
gctctccagtcagtgccggc

SEQ ID NO: 2496 - DNA, 23 bp, Artificial Sequence
  Description of Artificial Sequence: Synthetic oligonucleotide
agatgggagggcatatgagagcg

SEQ ID NO: 2497 - DNA, 25 bp, Artificial Sequence
  Description of Artificial Sequence: Synthetic oligonucleotide
tgtttcacaattgccatgtggattc

SEQ ID NO: 2498 - DNA, 19 bp, Artificial Sequence
  Description of Artificial Sequence: Synthetic oligonucleotide
ccactccgcccaccttccg

SEQ ID NO: 2499 - DNA, 23 bp, Artificial Sequence
  Description of Artificial Sequence: Synthetic oligonucleotide
cttgtcatgcctcacagcagtgc

SEQ ID NO: 2500 - DNA, 18 bp, Artificial Sequence
  Description of Artificial Sequence: Synthetic oligonucleotide
cccgcagccagctggctc

SEQ ID NO: 2501 - DNA, 19 bp, Artificial Sequence
  Description of Artificial Sequence: Synthetic oligonucleotide
ggtggggccaggttctcac

SEQ ID NO: 2502 - DNA, 25 bp, Artificial Sequence
  Description of Artificial Sequence: Synthetic oligonucleotide
gtttggaggaatttttggttgtcac

SEQ ID NO: 2503 - DNA, 23 bp, Artificial Sequence
  Description of Artificial Sequence: Synthetic oligonucleotide
cctttctggcctctcacaggacg

SEQ ID NO: 2504 - DNA, 28 bp, Artificial Sequence
  Description of Artificial Sequence: Synthetic oligonucleotide
ccctttaactgcagctcacattattttc

SEQ ID NO: 2505 - DNA, 24 bp, Artificial Sequence
  Description of Artificial Sequence: Synthetic oligonucleotide
gcttgcggtgataaccattcaacg

SEQ ID NO: 2506 - DNA, 24 bp, Artificial Sequence
  Description of Artificial Sequence: Synthetic oligonucleotide
ttgaggcaaagtgggaagagaaag

SEQ ID NO: 2507 - DNA, 22 bp, Artificial Sequence
  Description of Artificial Sequence: Synthetic oligonucleotide
cagacctgcctttgggtaggga

SEQ ID NO: 2508 - DNA, 24 bp, Artificial Sequence
  Description of Artificial Sequence: Synthetic oligonucleotide
ctcccatcagccctgttttacctg

SEQ ID NO: 2509 - DNA, 23 bp, Artificial Sequence
  Description of Artificial Sequence: Synthetic oligonucleotide
aggggtaggaaggttgtagcccc

SEQ ID NO: 2510 - DNA, 23 bp, Artificial Sequence
  Description of Artificial Sequence: Synthetic oligonucleotide
caaattcttgggcatgaagtcgc

SEQ ID NO: 2511 - DNA, 22 bp, Artificial Sequence
  Description of Artificial Sequence: Synthetic oligonucleotide
gatatgctgggctctggcttga

SEQ ID NO: 2512 - DNA, 22 bp, Artificial Sequence
  Description of Artificial Sequence: Synthetic oligonucleotide
tggactcccgtgactgagaccg

SEQ ID NO: 2513 - DNA, 23 bp, Artificial Sequence
  Description of Artificial Sequence: Synthetic oligonucleotide
ctactggtggtcagatgtgccac

SEQ ID NO: 2514 - DNA, 23 bp, Artificial Sequence
  Description of Artificial Sequence: Synthetic oligonucleotide
ctactggtggtcagatgtgccac

SEQ ID NO: 2515 - DNA, 23 bp, Artificial Sequence
  Description of Artificial Sequence: Synthetic oligonucleotide
taagctggcagtcctaaccccac

SEQ ID NO: 2516 - DNA, 23 bp, Artificial Sequence
  Description of Artificial Sequence: Synthetic oligonucleotide
tggccacatggagcaagtttaac

SEQ ID NO: 2517 - DNA, 23 bp, Artificial Sequence
  Description of Artificial Sequence: Synthetic oligonucleotide
ctcaagctgcaaacaggatccac

SEQ ID NO: 2518 - DNA, 25 bp, Artificial Sequence
  Description of Artificial Sequence: Synthetic oligonucleotide
gcagagtttgtgcagacacacagac

SEQ ID NO: 2519 - DNA, 23 bp, Artificial Sequence
  Description of Artificial Sequence: Synthetic oligonucleotide
atgagggtcagctcatttgcctg

SEQ ID NO: 2520 - DNA, 24 bp, Artificial Sequence
  Description of Artificial Sequence: Synthetic oligonucleotide
caaaagcacacagagacctcctgc

SEQ ID NO: 2521 - DNA, 24 bp, Artificial Sequence
  Description of Artificial Sequence: Synthetic oligonucleotide
ttttgttaacaagatgggcacgac

SEQ ID NO: 2522 - DNA, 24 bp, Artificial Sequence
  Description of Artificial Sequence: Synthetic oligonucleotide
ctgcatccagtggaactaaagccg

SEQ ID NO: 2523 - DNA, 24 bp, Artificial Sequence
  Description of Artificial Sequence: Synthetic oligonucleotide
cgggatgatagcagctctcctacg

SEQ ID NO: 2524 - DNA, 23 bp, Artificial Sequence
  Description of Artificial Sequence: Synthetic oligonucleotide
actgatgggtggggaatgttgag

SEQ ID NO: 2525 - DNA, 24 bp, Artificial Sequence
  Description of Artificial Sequence: Synthetic oligonucleotide
caggtgtctggagtgcaggtacac

SEQ ID NO: 2526 - DNA, 24 bp, Artificial Sequence
  Description of Artificial Sequence: Synthetic oligonucleotide
tggagaggaaactactggcttggc

SEQ ID NO: 2527 - DNA, 24 bp, Artificial Sequence
  Description of Artificial Sequence: Synthetic oligonucleotide
agttggccatctttgcatatgctg

SEQ ID NO: 2528 - DNA, 25 bp, Artificial Sequence
  Description of Artificial Sequence: Synthetic oligonucleotide
aacacagacaactcaccaccacctg

SEQ ID NO: 2529 - DNA, 22 bp, Artificial Sequence
  Description of Artificial Sequence: Synthetic oligonucleotide
gttgccaagcacatgttgcaac

SEQ ID NO: 2530 - DNA, 25 bp, Artificial Sequence
  Description of Artificial Sequence: Synthetic oligonucleotide
tgcctcctgatctatcgacagactg

SEQ ID NO: 2531 - DNA, 22 bp, Artificial Sequence
  Description of Artificial Sequence: Synthetic oligonucleotide
aggcaggttgtgcagaggatcc

SEQ ID NO: 2532 - DNA, 25 bp, Artificial Sequence
  Description of Artificial Sequence: Synthetic oligonucleotide
gcagtagccgaaggttttccttctg

SEQ ID NO: 2533 - DNA, 25 bp, Artificial Sequence
  Description of Artificial Sequence: Synthetic oligonucleotide
aatggtcacatgaaaatgcatgaac

SEQ ID NO: 2534 - DNA, 25 bp, Artificial Sequence
  Description of Artificial Sequence: Synthetic oligonucleotide
aaccttggacagaggcagaactctc

SEQ ID NO: 2535 - DNA, 25 bp, Artificial Sequence
  Description of Artificial Sequence: Synthetic oligonucleotide
cccagccctgtgtagttagagcagg

SEQ ID NO: 2536 - DNA, 25 bp, Artificial Sequence
  Description of Artificial Sequence: Synthetic oligonucleotide
ggtgttggagatttggggtacaaag

SEQ ID NO: 2537 - DNA, 23 bp, Artificial Sequence
  Description of Artificial Sequence: Synthetic oligonucleotide
cgatgatgagcagagcttcctgc

SEQ ID NO: 2538 - DNA, 22 bp, Artificial Sequence
  Description of Artificial Sequence: Synthetic oligonucleotide
gtggttccatttccccttggag

SEQ ID NO: 2539 - DNA, 24 bp, Artificial Sequence
  Description of Artificial Sequence: Synthetic oligonucleotide
caggaagtctggagtcgagcaagg

SEQ ID NO: 2540 - DNA, 23 bp, Artificial Sequence
  Description of Artificial Sequence: Synthetic oligonucleotide
gtgagccactttgcctttctgat

SEQ ID NO: 2541 - DNA, 23 bp, Artificial Sequence
  Description of Artificial Sequence: Synthetic oligonucleotide
agatcatgtgggcatagggctcg

SEQ ID NO: 2542 - DNA, 22 bp, Artificial Sequence
  Description of Artificial Sequence: Synthetic oligonucleotide
accctctggctcatgttgggtc

SEQ ID NO: 2543 - DNA, 23 bp, Artificial Sequence
  Description of Artificial Sequence: Synthetic oligonucleotide
tgttgccaaatccaatggtcatc

SEQ ID NO: 2544 - DNA, 26 bp, Artificial Sequence
  Description of Artificial Sequence: Synthetic oligonucleotide
ccacaatgtacacatcccaggatttg

SEQ ID NO: 2545 - DNA, 25 bp, Artificial Sequence
  Description of Artificial Sequence: Synthetic oligonucleotide
ggaatattggtgtccatgggatttt

SEQ ID NO: 2546 - DNA, 25 bp, Artificial Sequence
  Description of Artificial Sequence: Synthetic oligonucleotide
gagtcgttgagtgtgaggaaagctg

SEQ ID NO: 2547 - DNA, 25 bp, Artificial Sequence
  Description of Artificial Sequence: Synthetic oligonucleotide
gcttgaatcccatgtttacacccac

SEQ ID NO: 2548 - DNA, 21 bp, Artificial Sequence
  Description of Artificial Sequence: Synthetic oligonucleotide
tccctttgggcttcagcacag

SEQ ID NO: 2549 - DNA, 24 bp, Artificial Sequence
  Description of Artificial Sequence: Synthetic oligonucleotide
gatttcaagccccaggtaggagtt

SEQ ID NO: 2550 - DNA, 22 bp, Artificial Sequence
  Description of Artificial Sequence: Synthetic oligonucleotide
accaactctaccccaagcccac

SEQ ID NO: 2551 - DNA, 21 bp, Artificial Sequence
  Description of Artificial Sequence: Synthetic oligonucleotide
gggaaggtgacagtgaggggc

SEQ ID NO: 2552 - DNA, 22 bp, Artificial Sequence
  Description of Artificial Sequence: Synthetic oligonucleotide
ttccatctggaccagtgccacc

SEQ ID NO: 2553 - DNA, 26 bp, Artificial Sequence
  Description of Artificial Sequence: Synthetic oligonucleotide
tctccagagagtgtgtggagcaatac

SEQ ID NO: 2554 - DNA, 26 bp, Artificial Sequence
  Description of Artificial Sequence: Synthetic oligonucleotide
tgggaagaggcagacgatagatacac

SEQ ID NO: 2555 - DNA, 25 bp, Artificial Sequence
  Description of Artificial Sequence: Synthetic oligonucleotide
cctgtcacttgtaaccctgtgtgac

SEQ ID NO: 2556 - DNA, 26 bp, Artificial Sequence
  Description of Artificial Sequence: Synthetic oligonucleotide
ccctgttgaagcagttaggtggtaac

SEQ ID NO: 2557 - DNA, 24 bp, Artificial Sequence
  Description of Artificial Sequence: Synthetic oligonucleotide
gtcagagtaatggtgaggggcagg

SEQ ID NO: 2558 - DNA, 21 bp, Artificial Sequence
  Description of Artificial Sequence: Synthetic oligonucleotide
ccgtctttgagatggggagcc

SEQ ID NO: 2559 - DNA, 26 bp, Artificial Sequence
  Description of Artificial Sequence: Synthetic oligonucleotide
tgtttacattcaactgcactgaccag

SEQ ID NO: 2560 - DNA, 25 bp, Artificial Sequence
  Description of Artificial Sequence: Synthetic oligonucleotide
tttgccctcaagattctttctttgc

SEQ ID NO: 2561 - DNA, 23 bp, Artificial Sequence
  Description of Artificial Sequence: Synthetic oligonucleotide
aactggaatgagtcaggctgggg

SEQ ID NO: 2562 - DNA, 24 bp, Artificial Sequence
  Description of Artificial Sequence: Synthetic oligonucleotide
acccccaggacatcattaaatgtg

SEQ ID NO: 2563 - DNA, 26 bp, Artificial Sequence
  Description of Artificial Sequence: Synthetic oligonucleotide
ggtggtttggactgttattcccaatc

SEQ ID NO: 2564 - DNA, 22 bp, Artificial Sequence
  Description of Artificial Sequence: Synthetic oligonucleotide
caaaggcttgctgcaatctggg

SEQ ID NO: 2565 - DNA, 21 bp, Artificial Sequence
  Description of Artificial Sequence: Synthetic oligonucleotide
ggcagccaggaggactgtgac

SEQ ID NO: 2566 - DNA, 25 bp, Artificial Sequence
  Description of Artificial Sequence: Synthetic oligonucleotide
cggtgtttccacagtatccatcacc

SEQ ID NO: 2567 - DNA, 23 bp, Artificial Sequence
  Description of Artificial Sequence: Synthetic oligonucleotide
ccctctgagcaccaaagtcaaag

SEQ ID NO: 2568 - DNA, 24 bp, Artificial Sequence
  Description of Artificial Sequence: Synthetic oligonucleotide
tcatctcatggtcctcttcgtgtc

SEQ ID NO: 2569 - DNA, 25 bp, Artificial Sequence
  Description of Artificial Sequence: Synthetic oligonucleotide
ttttgcatcctctgattcagtcaac

SEQ ID NO: 2570 - DNA, 22 bp, Artificial Sequence
  Description of Artificial Sequence: Synthetic oligonucleotide
cccccaaacaattccaccatgc

SEQ ID NO: 2571 - DNA, 21 bp, Artificial Sequence
  Description of Artificial Sequence: Synthetic oligonucleotide
agaagggagtggctggtccca

SEQ ID NO: 2572 - DNA, 21 bp, Artificial Sequence
  Description of Artificial Sequence: Synthetic oligonucleotide
cttgccaggaggaaccgtcac

SEQ ID NO: 2573 - DNA, 24 bp, Artificial Sequence
  Description of Artificial Sequence: Synthetic oligonucleotide
tcatcatgaccattctgctcaccg

SEQ ID NO: 2574 - DNA, 22 bp, Artificial Sequence
  Description of Artificial Sequence: Synthetic oligonucleotide
ctcatctgcctctgggcagacg

SEQ ID NO: 2575 - DNA, 24 bp, Artificial Sequence
  Description of Artificial Sequence: Synthetic oligonucleotide
gcctgttttctttgagcatgtccg

SEQ ID NO: 2576 - DNA, 23 bp, Artificial Sequence
  Description of Artificial Sequence: Synthetic oligonucleotide
atttgatgccttggccatcgacc

SEQ ID NO: 2577 - DNA, 21 bp, Artificial Sequence
  Description of Artificial Sequence: Synthetic oligonucleotide
caggagggccctgggtaagag

SEQ ID NO: 2578 - DNA, 26 bp, Artificial Sequence
  Description of Artificial Sequence: Synthetic oligonucleotide
ggaatacaccttgcatgacaggaaac

SEQ ID NO: 2579 - DNA, 24 bp, Artificial Sequence
  Description of Artificial Sequence: Synthetic oligonucleotide
cccaacacacattaggtcctccag

SEQ ID NO: 2580 - DNA, 25 bp, Artificial Sequence
  Description of Artificial Sequence: Synthetic oligonucleotide
ttgaggggtgcattaacgtaagaca

SEQ ID NO: 2581 - DNA, 25 bp, Artificial Sequence
  Description of Artificial Sequence: Synthetic oligonucleotide
cacagagctcctaaaacccttgaac

SEQ ID NO: 2582 - DNA, 22 bp, Artificial Sequence
  Description of Artificial Sequence: Synthetic oligonucleotide
gggaaactcaaaggggctcagc

SEQ ID NO: 2583 - DNA, 25 bp, Artificial Sequence
  Description of Artificial Sequence: Synthetic oligonucleotide
ttacagtttccccctttccaagaac

SEQ ID NO: 2584 - DNA, 26 bp, Artificial Sequence
  Description of Artificial Sequence: Synthetic oligonucleotide
cagcccactgaactacacattatggc

SEQ ID NO: 2585 - DNA, 25 bp, Artificial Sequence
  Description of Artificial Sequence: Synthetic oligonucleotide
tgagttttggttctcccaaccttca

SEQ ID NO: 2586 - DNA, 26 bp, Artificial Sequence
  Description of Artificial Sequence: Synthetic oligonucleotide
cctttctcaaactcatgtttttggcg

SEQ ID NO: 2587 - DNA, 21 bp, Artificial Sequence
  Description of Artificial Sequence: Synthetic oligonucleotide
catgtgctgggttgtccagcg

SEQ ID NO: 2588 - DNA, 22 bp, Artificial Sequence
  Description of Artificial Sequence: Synthetic oligonucleotide
gctggaacatcaaatgcccacc

SEQ ID NO: 2589 - DNA, 21 bp, Artificial Sequence
  Description of Artificial Sequence: Synthetic oligonucleotide
gatggtccagtccctgaccca

SEQ ID NO: 2590 - DNA, 23 bp, Artificial Sequence
  Description of Artificial Sequence: Synthetic oligonucleotide
agcatctccaccctcccctagag

SEQ ID NO: 2591 - DNA, 25 bp, Artificial Sequence
  Description of Artificial Sequence: Synthetic oligonucleotide
tgcaatcactatcaaaatcccaaag

SEQ ID NO: 2592 - DNA, 24 bp, Artificial Sequence
  Description of Artificial Sequence: Synthetic oligonucleotide
aaccactcgtatctctccaccctg

SEQ ID NO: 2593 - DNA, 26 bp, Artificial Sequence
  Description of Artificial Sequence: Synthetic oligonucleotide
ggtcttctgacttcaaatccagtgcc

SEQ ID NO: 2594 - DNA, 25 bp, Artificial Sequence
  Description of Artificial Sequence: Synthetic oligonucleotide
cctgcagtgagtagagccaagtttc

SEQ ID NO: 2595 - DNA, 20 bp, Artificial Sequence
  Description of Artificial Sequence: Synthetic oligonucleotide
cgcccctgcccatttttagc

SEQ ID NO: 2596 - DNA, 26 bp, Artificial Sequence
  Description of Artificial Sequence: Synthetic oligonucleotide
ggaacacagaaatggaatggaggtag

SEQ ID NO: 2597 - DNA, 23 bp, Artificial Sequence
  Description of Artificial Sequence: Synthetic oligonucleotide
gcacctgcatgtgtctgtgttca

SEQ ID NO: 2598 - DNA, 25 bp, Artificial Sequence
  Description of Artificial Sequence: Synthetic oligonucleotide
gagggattgtctgaagagaagctgg

SEQ ID NO: 2599 - DNA, 25 bp, Artificial Sequence
  Description of Artificial Sequence: Synthetic oligonucleotide
ggttgtcctctagaacacccacacg

SEQ ID NO: 2600 - DNA, 21 bp, Artificial Sequence
  Description of Artificial Sequence: Synthetic oligonucleotide
ccaggaatgaggtcccccaag

SEQ ID NO: 2601 - DNA, 21 bp, Artificial Sequence
  Description of Artificial Sequence: Synthetic oligonucleotide
agcgtggtcttggatggcagc

SEQ ID NO: 2602 - DNA, 24 bp, Artificial Sequence
  Description of Artificial Sequence: Synthetic oligonucleotide
tgaacaaaccaacattcaggctcc

SEQ ID NO: 2603 - DNA, 23 bp, Artificial Sequence
  Description of Artificial Sequence: Synthetic oligonucleotide
tctccaactatgtggcttgcccg

SEQ ID NO: 2604 - DNA, 23 bp, Artificial Sequence
  Description of Artificial Sequence: Synthetic oligonucleotide
caggtgtctcctaggcgcctatg

SEQ ID NO: 2605 - DNA, 24 bp, Artificial Sequence
  Description of Artificial Sequence: Synthetic oligonucleotide
atgcaaattcccacatctgaaagg

SEQ ID NO: 2606 - DNA, 23 bp, Artificial Sequence
  Description of Artificial Sequence: Synthetic oligonucleotide
cccagggtaacctacctccctcg

SEQ ID NO: 2607 - DNA, 22 bp, Artificial Sequence
  Description of Artificial Sequence: Synthetic oligonucleotide
tttttccctcccctgcattcac

SEQ ID NO: 2608 - DNA, 26 bp, Artificial Sequence
  Description of Artificial Sequence: Synthetic oligonucleotide
gcattgacttcattgctcagctaaac

SEQ ID NO: 2609 - DNA, 23 bp, Artificial Sequence
  Description of Artificial Sequence: Synthetic oligonucleotide
gaccctggttgggaggtcttgtc

SEQ ID NO: 2610 - DNA, 24 bp, Artificial Sequence
  Description of Artificial Sequence: Synthetic oligonucleotide
tgcacctgtgcttttatttcaggg

SEQ ID NO: 2611 - DNA, 25 bp, Artificial Sequence
  Description of Artificial Sequence: Synthetic oligonucleotide
gagatggggatccctgatttgtagc

SEQ ID NO: 2612 - DNA, 24 bp, Artificial Sequence
  Description of Artificial Sequence: Synthetic oligonucleotide
ggaagccagtcacaggaggctacg

SEQ ID NO: 2613 - DNA, 23 bp, Artificial Sequence
  Description of Artificial Sequence: Synthetic oligonucleotide
acaggctgggctagtggttgtgg

SEQ ID NO: 2614 - DNA, 21 bp, Artificial Sequence
  Description of Artificial Sequence: Synthetic oligonucleotide
ggaacaggcactggccatgtc

SEQ ID NO: 2615 - DNA, 26 bp, Artificial Sequence
  Description of Artificial Sequence: Synthetic oligonucleotide
tcatttgaggattcaggtcaatgaac

SEQ ID NO: 2616 - DNA, 23 bp, Artificial Sequence
  Description of Artificial Sequence: Synthetic oligonucleotide
ggagaacgaagacatcttggcac

SEQ ID NO: 2617 - DNA, 24 bp, Artificial Sequence
  Description of Artificial Sequence: Synthetic oligonucleotide
tgaggaaaggactcttggctgagt

SEQ ID NO: 2618 - DNA, 26 bp, Artificial Sequence
  Description of Artificial Sequence: Synthetic oligonucleotide
ttgacaaggcatgtccataagactcg

SEQ ID NO: 2619 - DNA, 23 bp, Artificial Sequence
  Description of Artificial Sequence: Synthetic oligonucleotide
cagacagtgcttcagagggcacc

SEQ ID NO: 2620 - DNA, 24 bp, Artificial Sequence
  Description of Artificial Sequence: Synthetic oligonucleotide
tggtgatagtggcatcgatgactg

SEQ ID NO: 2621 - DNA, 25 bp, Artificial Sequence
  Description of Artificial Sequence: Synthetic oligonucleotide
gaatgccagtcagaatgcaaaattg

SEQ ID NO: 2622 - DNA, 20 bp, Artificial Sequence
  Description of Artificial Sequence: Synthetic oligonucleotide
atcccccaccacccatgagc

SEQ ID NO: 2623 - DNA, 26 bp, Artificial Sequence
  Description of Artificial Sequence: Synthetic oligonucleotide
agggaatctggtgtccttagatcacc

SEQ ID NO: 2624 - DNA, 26 bp, Artificial Sequence
  Description of Artificial Sequence: Synthetic oligonucleotide
tcaaagtttaggggaacatcgagatc

SEQ ID NO: 2625 - DNA, 25 bp, Artificial Sequence
  Description of Artificial Sequence: Synthetic oligonucleotide
cacagacctttcaaggactcaccta

SEQ ID NO: 2626 - DNA, 25 bp, Artificial Sequence
  Description of Artificial Sequence: Synthetic oligonucleotide
gcacatcagtgatgaatgcaagagg

SEQ ID NO: 2627 - DNA, 22 bp, Artificial Sequence
  Description of Artificial Sequence: Synthetic oligonucleotide
aaaggggagctggtatgtgcag

SEQ ID NO: 2628 - DNA, 26 bp, Artificial Sequence
  Description of Artificial Sequence: Synthetic oligonucleotide
gccaaacaagtctatgaggtcacctg

SEQ ID NO: 2629 - DNA, 25 bp, Artificial Sequence
  Description of Artificial Sequence: Synthetic oligonucleotide
ttaaatctaggtaggaaagggcggg

SEQ ID NO: 2630 - DNA, 25 bp, Artificial Sequence
  Description of Artificial Sequence: Synthetic oligonucleotide
tgctccataaggctctttagaagcg

SEQ ID NO: 2631 - DNA, 25 bp, Artificial Sequence
  Description of Artificial Sequence: Synthetic oligonucleotide
ttgtgagccaacaaatctatggctg

SEQ ID NO: 2632 - DNA, 23 bp, Artificial Sequence
  Description of Artificial Sequence: Synthetic oligonucleotide
gggtggctatagggctggaaaac

SEQ ID NO: 2633 - DNA, 25 bp, Artificial Sequence
  Description of Artificial Sequence: Synthetic oligonucleotide
tccttgaaaaccagagttcttggtg

SEQ ID NO: 2634 - DNA, 23 bp, Artificial Sequence
  Description of Artificial Sequence: Synthetic oligonucleotide
agtggagctgactggtccgagat

SEQ ID NO: 2635 - DNA, 26 bp, Artificial Sequence
  Description of Artificial Sequence: Synthetic oligonucleotide
gcatttccctaaaggacattgattcc

SEQ ID NO: 2636 - DNA, 25 bp, Artificial Sequence
  Description of Artificial Sequence: Synthetic oligonucleotide
tttcaggcaaaggacttcaagactg

SEQ ID NO: 2637 - DNA, 21 bp, Artificial Sequence
  Description of Artificial Sequence: Synthetic oligonucleotide
aaagcatcaccatggcccaac

SEQ ID NO: 2638 - DNA, 25 bp, Artificial Sequence
  Description of Artificial Sequence: Synthetic oligonucleotide
ttcccttcacttgctttcctttctc

SEQ ID NO: 2639 - DNA, 26 bp, Artificial Sequence
  Description of Artificial Sequence: Synthetic oligonucleotide
cagatattttgtcacctgcagcaacg

SEQ ID NO: 2640 - DNA, 23 bp, Artificial Sequence
  Description of Artificial Sequence: Synthetic oligonucleotide
tctcataaggatggcatccaggc

SEQ ID NO: 2641 - DNA, 26 bp, Artificial Sequence
  Description of Artificial Sequence: Synthetic oligonucleotide
ttccatattggtgtcatgacaatcag

SEQ ID NO: 2642 - DNA, 24 bp, Artificial Sequence
  Description of Artificial Sequence: Synthetic oligonucleotide
tctgtccttagccagggaccttcc

SEQ ID NO: 2643 - DNA, 23 bp, Artificial Sequence
  Description of Artificial Sequence: Synthetic oligonucleotide
gaaatctcccctcactgccaaat

SEQ ID NO: 2644 - DNA, 20 bp, Artificial Sequence
  Description of Artificial Sequence: Synthetic oligonucleotide
cagggcagctgtggtccctg

SEQ ID NO: 2645 - DNA, 26 bp, Artificial Sequence
  Description of Artificial Sequence: Synthetic oligonucleotide
ccattcttcttccactcttcacagac

SEQ ID NO: 2646 - DNA, 24 bp, Artificial Sequence
  Description of Artificial Sequence: Synthetic oligonucleotide
agcagtcacactccaaaagagggc

SEQ ID NO: 2647 - DNA, 27 bp, Artificial Sequence
  Description of Artificial Sequence: Synthetic oligonucleotide
cctagactgggctttttaacactggag

SEQ ID NO: 2648 - DNA, 23 bp, Artificial Sequence
  Description of Artificial Sequence: Synthetic oligonucleotide
agtgtccaaatctccatcgtgcc

SEQ ID NO: 2649 - DNA, 26 bp, Artificial Sequence
  Description of Artificial Sequence: Synthetic oligonucleotide
tcattgctggttatttatgcctcaga

SEQ ID NO: 2650 - DNA, 24 bp, Artificial Sequence
  Description of Artificial Sequence: Synthetic oligonucleotide
aacgcaggatggatataggtgaag

SEQ ID NO: 2651 - DNA, 24 bp, Artificial Sequence
  Description of Artificial Sequence: Synthetic oligonucleotide
gacatcttcacgcacagaaggagc

SEQ ID NO: 2652 - DNA, 23 bp, Artificial Sequence
  Description of Artificial Sequence: Synthetic oligonucleotide
ccccaccttttgcctatggaagc

SEQ ID NO: 2653 - DNA, 25 bp, Artificial Sequence
  Description of Artificial Sequence: Synthetic oligonucleotide
cctagttaagtggcaagatgcccac

SEQ ID NO: 2654 - DNA, 24 bp, Artificial Sequence
  Description of Artificial Sequence: Synthetic oligonucleotide
ggctgacttcaggggtggagtaac

SEQ ID NO: 2655 - DNA, 26 bp, Artificial Sequence
  Description of Artificial Sequence: Synthetic oligonucleotide
tgtggataaggggaaccactgtatac

SEQ ID NO: 2656 - DNA, 26 bp, Artificial Sequence
  Description of Artificial Sequence: Synthetic oligonucleotide
tgggtttttgttgatctgaggaactc

SEQ ID NO: 2657 - DNA, 25 bp, Artificial Sequence
  Description of Artificial Sequence: Synthetic oligonucleotide
ccaaaacagaatttggaaaatccag

SEQ ID NO: 2658 - DNA, 25 bp, Artificial Sequence
  Description of Artificial Sequence: Synthetic oligonucleotide
tgctgatggaaagacaactttgttg

SEQ ID NO: 2659 - DNA, 22 bp, Artificial Sequence
  Description of Artificial Sequence: Synthetic oligonucleotide
gcccagcaccatctgtgtgatg

SEQ ID NO: 2660 - DNA, 25 bp, Artificial Sequence
  Description of Artificial Sequence: Synthetic oligonucleotide
aatcgtcagcctcttcagaatgagc

SEQ ID NO: 2661 - DNA, 25 bp, Artificial Sequence
  Description of Artificial Sequence: Synthetic oligonucleotide
cctaggggacaggcatgtgttaaag

SEQ ID NO: 2662 - DNA, 20 bp, Artificial Sequence
  Description of Artificial Sequence: Synthetic oligonucleotide
gctcccgtgtcggtgtctcc

SEQ ID NO: 2663 - DNA, 26 bp, Artificial Sequence
  Description of Artificial Sequence: Synthetic oligonucleotide
catggatgaagaacttgcaaaaaaac

SEQ ID NO: 2664 - DNA, 25 bp, Artificial Sequence
  Description of Artificial Sequence: Synthetic oligonucleotide
aagaaaatgtctatggcaaagggcc

SEQ ID NO: 2665 - DNA, 23 bp, Artificial Sequence
  Description of Artificial Sequence: Synthetic oligonucleotide
tctgagagtctgggtggtgctcc

SEQ ID NO: 2666 - DNA, 26 bp, Artificial Sequence
  Description of Artificial Sequence: Synthetic oligonucleotide
tgttaagaatgaacccagggtatcac

SEQ ID NO: 2667 - DNA, 24 bp, Artificial Sequence
  Description of Artificial Sequence: Synthetic oligonucleotide
gagcatccagtggcacactgtagg

SEQ ID NO: 2668 - DNA, 25 bp, Artificial Sequence
  Description of Artificial Sequence: Synthetic oligonucleotide
gtaagaaccatgggtgtgaaccatc

SEQ ID NO: 2669 - DNA, 26 bp, Artificial Sequence
  Description of Artificial Sequence: Synthetic oligonucleotide
ctcatggagttacaaaaccaacaccg

SEQ ID NO: 2670 - DNA, 24 bp, Artificial Sequence
  Description of Artificial Sequence: Synthetic oligonucleotide
tccaggtatggaatacaggggacg

SEQ ID NO: 2671 - DNA, 20 bp, Artificial Sequence
  Description of Artificial Sequence: Synthetic oligonucleotide
gggactgggaggaagcaggg

SEQ ID NO: 2672 - DNA, 25 bp, Artificial Sequence
  Description of Artificial Sequence: Synthetic oligonucleotide
tcatggactgttcatcgtgtagtgg

SEQ ID NO: 2673 - DNA, 23 bp, Artificial Sequence
  Description of Artificial Sequence: Synthetic oligonucleotide
ggagatggtctggcatctgtgac

SEQ ID NO: 2674 - DNA, 26 bp, Artificial Sequence
  Description of Artificial Sequence: Synthetic oligonucleotide
caagcaggaaagagaatgactctgac

SEQ ID NO: 2675 - DNA, 25 bp, Artificial Sequence
  Description of Artificial Sequence: Synthetic oligonucleotide
ttaaggttgctattcggctgacttc

SEQ ID NO: 2676 - DNA, 25 bp, Artificial Sequence
  Description of Artificial Sequence: Synthetic oligonucleotide
agggttacctccttttgttggaacg

SEQ ID NO: 2677 - DNA, 23 bp, Artificial Sequence
  Description of Artificial Sequence: Synthetic oligonucleotide
tcctgagccccagtttctgaaac

SEQ ID NO: 2678 - DNA, 24 bp, Artificial Sequence
  Description of Artificial Sequence: Synthetic oligonucleotide
cccaagaaggcacagactgtttcc

SEQ ID NO: 2679 - DNA, 26 bp, Artificial Sequence
  Description of Artificial Sequence: Synthetic oligonucleotide
cctggagggttcatagtctaatgggg

SEQ ID NO: 2680 - DNA, 27 bp, Artificial Sequence
  Description of Artificial Sequence: Synthetic oligonucleotide
cgagctatggactctgcattaggagag

SEQ ID NO: 2681 - DNA, 22 bp, Artificial Sequence
  Description of Artificial Sequence: Synthetic oligonucleotide
ctctgctgcctggtcctcactg

SEQ ID NO: 2682 - DNA, 24 bp, Artificial Sequence
  Description of Artificial Sequence: Synthetic oligonucleotide
gggagaccagggactcctctgatg

SEQ ID NO: 2683 - DNA, 26 bp, Artificial Sequence
  Description of Artificial Sequence: Synthetic oligonucleotide
gatgtgagatctgagactgaacccac

SEQ ID NO: 2684 - DNA, 26 bp, Artificial Sequence
  Description of Artificial Sequence: Synthetic oligonucleotide
agagccctagggtcctagaagagagg

SEQ ID NO: 2685 - DNA, 25 bp, Artificial Sequence
  Description of Artificial Sequence: Synthetic oligonucleotide
gacaggaccatgagggtaggagatt

SEQ ID NO: 2686 - DNA, 27 bp, Artificial Sequence
  Description of Artificial Sequence: Synthetic oligonucleotide
tgagtctctctgtccactgtgacattg

SEQ ID NO: 2687 - DNA, 20 bp, Artificial Sequence
  Description of Artificial Sequence: Synthetic oligonucleotide
gcctcaagggaagccccagg

SEQ ID NO: 2688 - DNA, 25 bp, Artificial Sequence
  Description of Artificial Sequence: Synthetic oligonucleotide
cctgctgtgtctttggagaaattcg

SEQ ID NO: 2689 - DNA, 26 bp, Artificial Sequence
  Description of Artificial Sequence: Synthetic oligonucleotide
tctatccccatcctctccagatagtc

SEQ ID NO: 2690 - DNA, 24 bp, Artificial Sequence
  Description of Artificial Sequence: Synthetic oligonucleotide
cagacaccccttgtctcttgggtc

SEQ ID NO: 2691 - DNA, 27 bp, Artificial Sequence
  Description of Artificial Sequence: Synthetic oligonucleotide
tgataaaaggcacctacaaaaaccctg

SEQ ID NO: 2692 - DNA, 25 bp, Artificial Sequence
  Description of Artificial Sequence: Synthetic oligonucleotide
tggggagaaacatttgacatctttc

SEQ ID NO: 2693 - DNA, 25 bp, Artificial Sequence
  Description of Artificial Sequence: Synthetic oligonucleotide
ttggatttagggaaaaggaaatgcc

SEQ ID NO: 2694 - DNA, 21 bp, Artificial Sequence
  Description of Artificial Sequence: Synthetic oligonucleotide
atggaaaggcgagaggcaccg

SEQ ID NO: 2695 - DNA, 26 bp, Artificial Sequence
  Description of Artificial Sequence: Synthetic oligonucleotide
tctcaccggtacaaaccctaaaagtc

SEQ ID NO: 2696 - DNA, 21 bp, Artificial Sequence
  Description of Artificial Sequence: Synthetic oligonucleotide
gtgggctctgaccaggtcctg

SEQ ID NO: 2697 - DNA, 21 bp, Artificial Sequence
  Description of Artificial Sequence: Synthetic oligonucleotide
cacacagggttcccagggctc

SEQ ID NO: 2698 - DNA, 25 bp, Artificial Sequence
  Description of Artificial Sequence: Synthetic oligonucleotide
acatttgtctgtgaaattggacccg

SEQ ID NO: 2699 - DNA, 25 bp, Artificial Sequence
  Description of Artificial Sequence: Synthetic oligonucleotide
acatatgcaaagggacaagaatgag

SEQ ID NO: 2700 - DNA, 25 bp, Artificial Sequence
  Description of Artificial Sequence: Synthetic oligonucleotide
ggttaacttttgagcaccctggctg

SEQ ID NO: 2701 - DNA, 23 bp, Artificial Sequence
  Description of Artificial Sequence: Synthetic oligonucleotide
gaggcttcccaataagctgcagg

SEQ ID NO: 2702 - DNA, 25 bp, Artificial Sequence
  Description of Artificial Sequence: Synthetic oligonucleotide
gcacagatgcaagtaggtgaacagg

SEQ ID NO: 2703 - DNA, 27 bp, Artificial Sequence
  Description of Artificial Sequence: Synthetic oligonucleotide
gagtctccctagtgtaaccttgacccg

SEQ ID NO: 2704 - DNA, 21 bp, Artificial Sequence
  Description of Artificial Sequence: Synthetic oligonucleotide
gagtcagtgcaggagccctgg

SEQ ID NO: 2705 - DNA, 22 bp, Artificial Sequence
  Description of Artificial Sequence: Synthetic oligonucleotide
aggcccattgcacaggacagtc

SEQ ID NO: 2706 - DNA, 26 bp, Artificial Sequence
  Description of Artificial Sequence: Synthetic oligonucleotide
acaaacaggcattttgcactattctc

SEQ ID NO: 2707 - DNA, 23 bp, Artificial Sequence
  Description of Artificial Sequence: Synthetic oligonucleotide
gtccttactccaaggcaagggtc

SEQ ID NO: 2708 - DNA, 21 bp, Artificial Sequence
  Description of Artificial Sequence: Synthetic oligonucleotide
agagggaggggccaggaggta

SEQ ID NO: 2709 - DNA, 27 bp, Artificial Sequence
  Description of Artificial Sequence: Synthetic oligonucleotide
cattggtcaggaaaagagaaacagagg

SEQ ID NO: 2710 - DNA, 27 bp, Artificial Sequence
  Description of Artificial Sequence: Synthetic oligonucleotide
tgagttaggtgtggtcagaggaagacg

SEQ ID NO: 2711 - DNA, 26 bp, Artificial Sequence
  Description of Artificial Sequence: Synthetic oligonucleotide
cccaccctatcctgtagttagggaag

SEQ ID NO: 2712 - DNA, 26 bp, Artificial Sequence
  Description of Artificial Sequence: Synthetic oligonucleotide
tctgtgtagatttgaagtcccaacac

SEQ ID NO: 2713 - DNA, 26 bp, Artificial Sequence
  Description of Artificial Sequence: Synthetic oligonucleotide
tgactgtccagcatcatctctgagtg

SEQ ID NO: 2714 - DNA, 23 bp, Artificial Sequence
  Description of Artificial Sequence: Synthetic oligonucleotide
gctccttcgtgcctagcaatgtg

SEQ ID NO: 2715 - DNA, 22 bp, Artificial Sequence
  Description of Artificial Sequence: Synthetic oligonucleotide
gctccaccctcaagcacttggg

SEQ ID NO: 2716 - DNA, 26 bp, Artificial Sequence
  Description of Artificial Sequence: Synthetic oligonucleotide
gagatcgatcgaagactgtgaaagtc

SEQ ID NO: 2717 - DNA, 26 bp, Artificial Sequence
  Description of Artificial Sequence: Synthetic oligonucleotide
cagctttgttgttgaaggatgttttt

SEQ ID NO: 2718 - DNA, 26 bp, Artificial Sequence
  Description of Artificial Sequence: Synthetic oligonucleotide
tgggaacacactggcccattatatag

SEQ ID NO: 2719 - DNA, 26 bp, Artificial Sequence
  Description of Artificial Sequence: Synthetic oligonucleotide
aatcatcgatttcatggtctttgacg

SEQ ID NO: 2720 - DNA, 24 bp, Artificial Sequence
  Description of Artificial Sequence: Synthetic oligonucleotide
tcctgcacacttcagcacaaaacc

SEQ ID NO: 2721 - DNA, 24 bp, Artificial Sequence
  Description of Artificial Sequence: Synthetic oligonucleotide
tcgggtttttcattgaaagtcatg

SEQ ID NO: 2722 - DNA, 24 bp, Artificial Sequence
  Description of Artificial Sequence: Synthetic oligonucleotide
tcacagcagtgggaatcaaagtgg

SEQ ID NO: 2723 - DNA, 21 bp, Artificial Sequence
  Description of Artificial Sequence: Synthetic oligonucleotide
cctccacaagacccaccctgg

SEQ ID NO: 2724 - DNA, 20 bp, Artificial Sequence
  Description of Artificial Sequence: Synthetic oligonucleotide
ctgggaccctgtgtgccagc

SEQ ID NO: 2725 - DNA, 26 bp, Artificial Sequence
  Description of Artificial Sequence: Synthetic oligonucleotide
ctccagtaggtcattcagatctccac

SEQ ID NO: 2726 - DNA, 27 bp, Artificial Sequence
  Description of Artificial Sequence: Synthetic oligonucleotide
gctgcagaacaaattcgaaagttaaag

SEQ ID NO: 2727 - DNA, 23 bp, Artificial Sequence
  Description of Artificial Sequence: Synthetic oligonucleotide
ctagaaaggggttgcagggttgc

SEQ ID NO: 2728 - DNA, 27 bp, Artificial Sequence
  Description of Artificial Sequence: Synthetic oligonucleotide
gcagtgctccaagacaagaaatttatc

SEQ ID NO: 2729 - DNA, 21 bp, Artificial Sequence
  Description of Artificial Sequence: Synthetic oligonucleotide
ggtttcctgctggacaggggc

SEQ ID NO: 2730 - DNA, 25 bp, Artificial Sequence
  Description of Artificial Sequence: Synthetic oligonucleotide
gctcaggagagagaagggaggaaac

SEQ ID NO: 2731 - DNA, 20 bp, Artificial Sequence
  Description of Artificial Sequence: Synthetic oligonucleotide
cgactgggctgcagccctac

SEQ ID NO: 2732 - DNA, 27 bp, Artificial Sequence
  Description of Artificial Sequence: Synthetic oligonucleotide
cagagtcattctctttcctgcttgtcg

SEQ ID NO: 2733 - DNA, 27 bp, Artificial Sequence
  Description of Artificial Sequence: Synthetic oligonucleotide
gcagccattcacactatacatttttgc

SEQ ID NO: 2734 - DNA, 25 bp, Artificial Sequence
  Description of Artificial Sequence: Synthetic oligonucleotide
gctggatgaggtcatctccaaatac

SEQ ID NO: 2735 - DNA, 25 bp, Artificial Sequence
  Description of Artificial Sequence: Synthetic oligonucleotide
cctgctacgtgactgttctctccac

SEQ ID NO: 2736 - DNA, 26 bp, Artificial Sequence
  Description of Artificial Sequence: Synthetic oligonucleotide
tttctctgacttgggctgacaattag

SEQ ID NO: 2737 - DNA, 22 bp, Artificial Sequence
  Description of Artificial Sequence: Synthetic oligonucleotide
tctgtgcgtctgcacaaactcc

SEQ ID NO: 2738 - DNA, 27 bp, Artificial Sequence
  Description of Artificial Sequence: Synthetic oligonucleotide
gccaaatcaacttttggagattttctt

SEQ ID NO: 2739 - DNA, 25 bp, Artificial Sequence
  Description of Artificial Sequence: Synthetic oligonucleotide
tttcctctcatacgggagctttctc

SEQ ID NO: 2740 - DNA, 22 bp, Artificial Sequence
  Description of Artificial Sequence: Synthetic oligonucleotide
ccccacctcagtgtccctcagg

SEQ ID NO: 2741 - DNA, 26 bp, Artificial Sequence
  Description of Artificial Sequence: Synthetic oligonucleotide
tttaaaaagctgggctgatcttacag

SEQ ID NO: 2742 - DNA, 22 bp, Artificial Sequence
  Description of Artificial Sequence: Synthetic oligonucleotide
ctgtggcagaacagagctgccg

SEQ ID NO: 2743 - DNA, 24 bp, Artificial Sequence
  Description of Artificial Sequence: Synthetic oligonucleotide
tgtgaggggtaggttttccttccc

SEQ ID NO: 2744 - DNA, 23 bp, Artificial Sequence
  Description of Artificial Sequence: Synthetic oligonucleotide
cctttgggcagtgattaggtcac

SEQ ID NO: 2745 - DNA, 27 bp, Artificial Sequence
  Description of Artificial Sequence: Synthetic oligonucleotide
caatctgatgtgcaaggtaattccatc

SEQ ID NO: 2746 - DNA, 21 bp, Artificial Sequence
  Description of Artificial Sequence: Synthetic oligonucleotide
cttcgtgagagcccaggctgg

SEQ ID NO: 2747 - DNA, 21 bp, Artificial Sequence
  Description of Artificial Sequence: Synthetic oligonucleotide
ctggtacctgcgcattgcagg

SEQ ID NO: 2748 - DNA, 23 bp, Artificial Sequence
  Description of Artificial Sequence: Synthetic oligonucleotide
cttgccatgaggttgggttgatc

SEQ ID NO: 2749 - DNA, 26 bp, Artificial Sequence
  Description of Artificial Sequence: Synthetic oligonucleotide
tcaacaggaatttccttcaggataag

SEQ ID NO: 2750 - DNA, 21 bp, Artificial Sequence
  Description of Artificial Sequence: Synthetic oligonucleotide
ggtgggagcagctgaagtgac

SEQ ID NO: 2751 - DNA, 23 bp, Artificial Sequence
  Description of Artificial Sequence: Synthetic oligonucleotide
aatcacaacatcgtgccacagtt

SEQ ID NO: 2752 - DNA, 24 bp, Artificial Sequence
  Description of Artificial Sequence: Synthetic oligonucleotide
ccaggaagtctgcattatcacgag

SEQ ID NO: 2753 - DNA, 22 bp, Artificial Sequence
  Description of Artificial Sequence: Synthetic oligonucleotide
ggtaatctcccaaggccctgca

SEQ ID NO: 2754 - DNA, 26 bp, Artificial Sequence
  Description of Artificial Sequence: Synthetic oligonucleotide
caatggcagtggctagaaagagtaat

SEQ ID NO: 2755 - DNA, 26 bp, Artificial Sequence
  Description of Artificial Sequence: Synthetic oligonucleotide
aaggctcaatgaaaggataatctccg

SEQ ID NO: 2756 - DNA, 27 bp, Artificial Sequence
  Description of Artificial Sequence: Synthetic oligonucleotide
gaacaaaaactggatgagatttccctg

SEQ ID NO: 2757 - DNA, 26 bp, Artificial Sequence
  Description of Artificial Sequence: Synthetic oligonucleotide
gatttccaggaaggaggaagtagagc

SEQ ID NO: 2758 - DNA, 22 bp, Artificial Sequence
  Description of Artificial Sequence: Synthetic oligonucleotide
cagcccatggttctgcatctcg

SEQ ID NO: 2759 - DNA, 21 bp, Artificial Sequence
  Description of Artificial Sequence: Synthetic oligonucleotide
cagggccacattgggacactc

SEQ ID NO: 2760 - DNA, 26 bp, Artificial Sequence
  Description of Artificial Sequence: Synthetic oligonucleotide
gttcaccttttccccataggttagtg

SEQ ID NO: 2761 - DNA, 23 bp, Artificial Sequence
  Description of Artificial Sequence: Synthetic oligonucleotide
aatagccttggcagtaaacgccg

SEQ ID NO: 2762 - DNA, 23 bp, Artificial Sequence
  Description of Artificial Sequence: Synthetic oligonucleotide
cccaaagggaaacatccctcatc

SEQ ID NO: 2763 - DNA, 21 bp, Artificial Sequence
  Description of Artificial Sequence: Synthetic oligonucleotide
aaagaatgccacggattgccc

SEQ ID NO: 2764 - DNA, 20 bp, Artificial Sequence
  Description of Artificial Sequence: Synthetic oligonucleotide
ccttcctgtacggggccctg

SEQ ID NO: 2765 - DNA, 20 bp, Artificial Sequence
  Description of Artificial Sequence: Synthetic oligonucleotide
agctcctccatgtgcctgcc

SEQ ID NO: 2766 - DNA, 27 bp, Artificial Sequence
  Description of Artificial Sequence: Synthetic oligonucleotide
tgagagcccagaacatgcatataaagc

SEQ ID NO: 2767 - DNA, 19 bp, Artificial Sequence
  Description of Artificial Sequence: Synthetic oligonucleotide
ccaccacgtccggcagttc

SEQ ID NO: 2768 - DNA, 27 bp, Artificial Sequence
  Description of Artificial Sequence: Synthetic oligonucleotide
tgtgttcaaataaggatacacccagcc

SEQ ID NO: 2769 - DNA, 26 bp, Artificial Sequence
  Description of Artificial Sequence: Synthetic oligonucleotide
tgagaaagtgccctagaacctgtacg

SEQ ID NO: 2770 - DNA, 26 bp, Artificial Sequence
  Description of Artificial Sequence: Synthetic oligonucleotide
tgtgagttctctgtacggggaagtta

SEQ ID NO: 2771 - DNA, 26 bp, Artificial Sequence
  Description of Artificial Sequence: Synthetic oligonucleotide
tgtgagttctctgtacggggaagtta

SEQ ID NO: 2772 - DNA, 24 bp, Artificial Sequence
  Description of Artificial Sequence: Synthetic oligonucleotide
gggcaacttactcttcctggcatc

SEQ ID NO: 2773 - DNA, 22 bp, Artificial Sequence
  Description of Artificial Sequence: Synthetic oligonucleotide
ccagggtaagtggcaccacagc

SEQ ID NO: 2774 - DNA, 20 bp, Artificial Sequence
  Description of Artificial Sequence: Synthetic oligonucleotide
cccctatgcctcccactccc

SEQ ID NO: 2775 - DNA, 19 bp, Artificial Sequence
  Description of Artificial Sequence: Synthetic oligonucleotide
cctgcggtccccaggttcg

SEQ ID NO: 2776 - DNA, 23 bp, Artificial Sequence
  Description of Artificial Sequence: Synthetic oligonucleotide
tttaggtcccatctgctcgctcg

SEQ ID NO: 2777 - DNA, 27 bp, Artificial Sequence
  Description of Artificial Sequence: Synthetic oligonucleotide
ccttcatagctggactccataaagacg

SEQ ID NO: 2778 - DNA, 26 bp, Artificial Sequence
  Description of Artificial Sequence: Synthetic oligonucleotide
tccaaatgtcccctagttcacaatag

SEQ ID NO: 2779 - DNA, 20 bp, Artificial Sequence
  Description of Artificial Sequence: Synthetic oligonucleotide
cagctattgccagccaccgc

SEQ ID NO: 2780 - DNA, 22 bp, Artificial Sequence
  Description of Artificial Sequence: Synthetic oligonucleotide
cctgggccactgaagcaaaagg

SEQ ID NO: 2781 - DNA, 26 bp, Artificial Sequence
  Description of Artificial Sequence: Synthetic oligonucleotide
ccttgattcagagctcagatggatgg

SEQ ID NO: 2782 - DNA, 26 bp, Artificial Sequence
  Description of Artificial Sequence: Synthetic oligonucleotide
tcacactgcaaatctctatgctcagg

SEQ ID NO: 2783 - DNA, 27 bp, Artificial Sequence
  Description of Artificial Sequence: Synthetic oligonucleotide
tttccacatgtgtcaaatgtaggactg

SEQ ID NO: 2784 - DNA, 27 bp, Artificial Sequence
  Description of Artificial Sequence: Synthetic oligonucleotide
gctggaaatacaggtacacctggaaag

SEQ ID NO: 2785 - DNA, 19 bp, Artificial Sequence
  Description of Artificial Sequence: Synthetic oligonucleotide
ccagcgggacccaaggaac

SEQ ID NO: 2786 - DNA, 27 bp, Artificial Sequence
  Description of Artificial Sequence: Synthetic oligonucleotide
tgtgtttaaaggcacatatgtgctttg

SEQ ID NO: 2787 - DNA, 23 bp, Artificial Sequence
  Description of Artificial Sequence: Synthetic oligonucleotide
ccatccccactgtcctcaagagg

SEQ ID NO: 2788 - DNA, 22 bp, Artificial Sequence
  Description of Artificial Sequence: Synthetic oligonucleotide
agcactctggagaaagccgggc

SEQ ID NO: 2789 - DNA, 22 bp, Artificial Sequence
  Description of Artificial Sequence: Synthetic oligonucleotide
acaaggttcatggcctgggaag

SEQ ID NO: 2790 - DNA, 24 bp, Artificial Sequence
  Description of Artificial Sequence: Synthetic oligonucleotide
tctgagtccctgagaacctagggg

SEQ ID NO: 2791 - DNA, 26 bp, Artificial Sequence
  Description of Artificial Sequence: Synthetic oligonucleotide
ctgaggagagacacacacctgtgtac

SEQ ID NO: 2792 - DNA, 25 bp, Artificial Sequence
  Description of Artificial Sequence: Synthetic oligonucleotide
caatttccaaacctgaagtgttggg

SEQ ID NO: 2793 - DNA, 25 bp, Artificial Sequence
  Description of Artificial Sequence: Synthetic oligonucleotide
tgaacttgtcctgagaatgaaggtc

SEQ ID NO: 2794 - DNA, 25 bp, Artificial Sequence
  Description of Artificial Sequence: Synthetic oligonucleotide
taagaaatctttgtgaagctgccac

SEQ ID NO: 2795 - DNA, 24 bp, Artificial Sequence
  Description of Artificial Sequence: Synthetic oligonucleotide
ttggaggctccccaaatattttgc

SEQ ID NO: 2796 - DNA, 23 bp, Artificial Sequence
  Description of Artificial Sequence: Synthetic oligonucleotide
cctgtgcaggaccaggttctttc

SEQ ID NO: 2797 - DNA, 21 bp, Artificial Sequence
  Description of Artificial Sequence: Synthetic oligonucleotide
cacctggggactcctgtgtgc

SEQ ID NO: 2798 - DNA, 22 bp, Artificial Sequence
  Description of Artificial Sequence: Synthetic oligonucleotide
aacatcccccacagctgtcagg

SEQ ID NO: 2799 - DNA, 22 bp, Artificial Sequence
  Description of Artificial Sequence: Synthetic oligonucleotide
cagggcccagagtgcttagagg

SEQ ID NO: 2800 - DNA, 28 bp, Artificial Sequence
  Description of Artificial Sequence: Synthetic oligonucleotide
caaggaagtgaatgacttgtacactggc

SEQ ID NO: 2801 - DNA, 23 bp, Artificial Sequence
  Description of Artificial Sequence: Synthetic oligonucleotide
tggtgaaggtcgtgtccctgtag

SEQ ID NO: 2802 - DNA, 20 bp, Artificial Sequence
  Description of Artificial Sequence: Synthetic oligonucleotide
gacagaccatggccatggcg

SEQ ID NO: 2803 - DNA, 22 bp, Artificial Sequence
  Description of Artificial Sequence: Synthetic oligonucleotide
atcacctattgcccaacgcgtc

SEQ ID NO: 2804 - DNA, 26 bp, Artificial Sequence
  Description of Artificial Sequence: Synthetic oligonucleotide
cctcatcaggaaaacctaaagtgggg

SEQ ID NO: 2805 - DNA, 24 bp, Artificial Sequence
  Description of Artificial Sequence: Synthetic oligonucleotide
cagatcctggtttgtgtggctttg

SEQ ID NO: 2806 - DNA, 27 bp, Artificial Sequence
  Description of Artificial Sequence: Synthetic oligonucleotide
tggcttgaagattagggaaatagtgtc

SEQ ID NO: 2807 - DNA, 23 bp, Artificial Sequence
  Description of Artificial Sequence: Synthetic oligonucleotide
ccagttcagggacggagattccg

SEQ ID NO: 2808 - DNA, 28 bp, Artificial Sequence
  Description of Artificial Sequence: Synthetic oligonucleotide
caatcctgctaatgtgagtcagattgtg

SEQ ID NO: 2809 - DNA, 26 bp, Artificial Sequence
  Description of Artificial Sequence: Synthetic oligonucleotide
aggatactggaagggaactcactctt

SEQ ID NO: 2810 - DNA, 23 bp, Artificial Sequence
  Description of Artificial Sequence: Synthetic oligonucleotide
attggtccctgagcttagccctg

SEQ ID NO: 2811 - DNA, 24 bp, Artificial Sequence
  Description of Artificial Sequence: Synthetic oligonucleotide
ctgcccagcaagaaactcagattc

SEQ ID NO: 2812 - DNA, 23 bp, Artificial Sequence
  Description of Artificial Sequence: Synthetic oligonucleotide
agctctgccgtttgacctgtgtg

SEQ ID NO: 2813 - DNA, 25 bp, Artificial Sequence
  Description of Artificial Sequence: Synthetic oligonucleotide
ttctggaaattgaaggaaggaaacc

SEQ ID NO: 2814 - DNA, 24 bp, Artificial Sequence
  Description of Artificial Sequence: Synthetic oligonucleotide
cttcctcactcagcctgcttcacg

SEQ ID NO: 2815 - DNA, 19 bp, Artificial Sequence
  Description of Artificial Sequence: Synthetic oligonucleotide
ccctgggcactgtcgctgc

SEQ ID NO: 2816 - DNA, 23 bp, Artificial Sequence
  Description of Artificial Sequence: Synthetic oligonucleotide
cctccatgactcaaggcacagac

SEQ ID NO: 2817 - DNA, 25 bp, Artificial Sequence
  Description of Artificial Sequence: Synthetic oligonucleotide
aaaatggaaatggcctaaatgtccc

SEQ ID NO: 2818 - DNA, 23 bp, Artificial Sequence
  Description of Artificial Sequence: Synthetic oligonucleotide
atgcctggacccttgtctgtttc

SEQ ID NO: 2819 - DNA, 27 bp, Artificial Sequence
  Description of Artificial Sequence: Synthetic oligonucleotide
cccagactttcacatacacattcatcg

SEQ ID NO: 2820 - DNA, 20 bp, Artificial Sequence
  Description of Artificial Sequence: Synthetic oligonucleotide
ggagaatggacccccagggc

SEQ ID NO: 2821 - DNA, 28 bp, Artificial Sequence
  Description of Artificial Sequence: Synthetic oligonucleotide
tgctagactctccataggatgctgaatc

SEQ ID NO: 2822 - DNA, 27 bp, Artificial Sequence
  Description of Artificial Sequence: Synthetic oligonucleotide
tgaaaaaaggtaagtttccctgtgatg

SEQ ID NO: 2823 - DNA, 23 bp, Artificial Sequence
  Description of Artificial Sequence: Synthetic oligonucleotide
cctctgcttcccttttgtttgcc

SEQ ID NO: 2824 - DNA, 24 bp, Artificial Sequence
  Description of Artificial Sequence: Synthetic oligonucleotide
cacagacaccttcctgccctagtg

SEQ ID NO: 2825 - DNA, 28 bp, Artificial Sequence
  Description of Artificial Sequence: Synthetic oligonucleotide
gaagaagcaattcactgactcctttctc

SEQ ID NO: 2826 - DNA, 24 bp, Artificial Sequence
  Description of Artificial Sequence: Synthetic oligonucleotide
tctctcagttccacagggctgttc

SEQ ID NO: 2827 - DNA, 22 bp, Artificial Sequence
  Description of Artificial Sequence: Synthetic oligonucleotide
cctcaccccttccctacctgag

SEQ ID NO: 2828 - DNA, 26 bp, Artificial Sequence
  Description of Artificial Sequence: Synthetic oligonucleotide
tctttcgctctggtttttaatgagac

SEQ ID NO: 2829 - DNA, 28 bp, Artificial Sequence
  Description of Artificial Sequence: Synthetic oligonucleotide
catcacttagctaaagggacaagctctg

SEQ ID NO: 2830 - DNA, 25 bp, Artificial Sequence
  Description of Artificial Sequence: Synthetic oligonucleotide
gttcctttctccttagtgccatgag

SEQ ID NO: 2831 - DNA, 26 bp, Artificial Sequence
  Description of Artificial Sequence: Synthetic oligonucleotide
ttctactggcatgaagacagacagac

SEQ ID NO: 2832 - DNA, 27 bp, Artificial Sequence
  Description of Artificial Sequence: Synthetic oligonucleotide
tggtcataaaatgaataaagcactggc

SEQ ID NO: 2833 - DNA, 27 bp, Artificial Sequence
  Description of Artificial Sequence: Synthetic oligonucleotide
ttggtctcttctgaagatttcacaaag

SEQ ID NO: 2834 - DNA, 25 bp, Artificial Sequence
  Description of Artificial Sequence: Synthetic oligonucleotide
tgagaagaactgctgctctccctac

SEQ ID NO: 2835 - DNA, 24 bp, Artificial Sequence
  Description of Artificial Sequence: Synthetic oligonucleotide
aaagaagggcaatggaagaaggac

SEQ ID NO: 2836 - DNA, 21 bp, Artificial Sequence
  Description of Artificial Sequence: Synthetic oligonucleotide
aaaccagaaggcccccaggtg

SEQ ID NO: 2837 - DNA, 22 bp, Artificial Sequence
  Description of Artificial Sequence: Synthetic oligonucleotide
acatcatgggcctcaattgctg

SEQ ID NO: 2838 - DNA, 21 bp, Artificial Sequence
  Description of Artificial Sequence: Synthetic oligonucleotide
ggaggtttccggtgtcagctg

SEQ ID NO: 2839 - DNA, 26 bp, Artificial Sequence
  Description of Artificial Sequence: Synthetic oligonucleotide
tctgcttagttaaggaagttccgaac

SEQ ID NO: 2840 - DNA, 28 bp, Artificial Sequence
  Description of Artificial Sequence: Synthetic oligonucleotide
ggaaaggctggagaatttaagaacaaac

SEQ ID NO: 2841 - DNA, 27 bp, Artificial Sequence
  Description of Artificial Sequence: Synthetic oligonucleotide
cgtacccagagtggagtgaacaatctg

SEQ ID NO: 2842 - DNA, 23 bp, Artificial Sequence
  Description of Artificial Sequence: Synthetic oligonucleotide
tgatttctggaatggatgcctgg

SEQ ID NO: 2843 - DNA, 22 bp, Artificial Sequence
  Description of Artificial Sequence: Synthetic oligonucleotide
agtccagtccagggctgcatcg

SEQ ID NO: 2844 - DNA, 23 bp, Artificial Sequence
  Description of Artificial Sequence: Synthetic oligonucleotide
gcgtcaacattcccaatgtgtgc

SEQ ID NO: 2845 - DNA, 25 bp, Artificial Sequence
  Description of Artificial Sequence: Synthetic oligonucleotide
actgttttttacctccacagggttg

SEQ ID NO: 2846 - DNA, 22 bp, Artificial Sequence
  Description of Artificial Sequence: Synthetic oligonucleotide
ccaagacacacgtgacccaccc

SEQ ID NO: 2847 - DNA, 22 bp, Artificial Sequence
  Description of Artificial Sequence: Synthetic oligonucleotide
acaaggggtgtctgctgctgtg

SEQ ID NO: 2848 - DNA, 27 bp, Artificial Sequence
  Description of Artificial Sequence: Synthetic oligonucleotide
tcacttttccagacaaaatacatggac

SEQ ID NO: 2849 - DNA, 24 bp, Artificial Sequence
  Description of Artificial Sequence: Synthetic oligonucleotide
tttggcttcatagctgggaagaag

SEQ ID NO: 2850 - DNA, 26 bp, Artificial Sequence
  Description of Artificial Sequence: Synthetic oligonucleotide
catcttccaggttttccatatccttg

SEQ ID NO: 2851 - DNA, 24 bp, Artificial Sequence
  Description of Artificial Sequence: Synthetic oligonucleotide
cagcatcctaggagctgaccacag

SEQ ID NO: 2852 - DNA, 26 bp, Artificial Sequence
  Description of Artificial Sequence: Synthetic oligonucleotide
tgttctacacccagagtcacaaactc

SEQ ID NO: 2853 - DNA, 23 bp, Artificial Sequence
  Description of Artificial Sequence: Synthetic oligonucleotide
ggtggtccacccaacagacaacg

SEQ ID NO: 2854 - DNA, 24 bp, Artificial Sequence
  Description of Artificial Sequence: Synthetic oligonucleotide
caagtcagcgttaatagggggcag

SEQ ID NO: 2855 - DNA, 21 bp, Artificial Sequence
  Description of Artificial Sequence: Synthetic oligonucleotide
ccttgtgctaggccaggctgg

SEQ ID NO: 2856 - DNA, 25 bp, Artificial Sequence
  Description of Artificial Sequence: Synthetic oligonucleotide
tgtaactgattttccctccaagggc

SEQ ID NO: 2857 - DNA, 28 bp, Artificial Sequence
  Description of Artificial Sequence: Synthetic oligonucleotide
caaatgttacctactaagggatgcctgg

SEQ ID NO: 2858 - DNA, 24 bp, Artificial Sequence
  Description of Artificial Sequence: Synthetic oligonucleotide
gctgagcagctgctgagtattgcg

SEQ ID NO: 2859 - DNA, 24 bp, Artificial Sequence
  Description of Artificial Sequence: Synthetic oligonucleotide
cagggttggagatctgttgatgag

SEQ ID NO: 2860 - DNA, 24 bp, Artificial Sequence
  Description of Artificial Sequence: Synthetic oligonucleotide
tcagggacttcgagggctattgtg

SEQ ID NO: 2861 - DNA, 26 bp, Artificial Sequence
  Description of Artificial Sequence: Synthetic oligonucleotide
cattagcaatttcacaatcttggggc

SEQ ID NO: 2862 - DNA, 25 bp, Artificial Sequence
  Description of Artificial Sequence: Synthetic oligonucleotide
ccagatgtctgaaaggttgaagccg

SEQ ID NO: 2863 - DNA, 24 bp, Artificial Sequence
  Description of Artificial Sequence: Synthetic oligonucleotide
atacagctggccctgtatttgtgg

SEQ ID NO: 2864 - DNA, 22 bp, Artificial Sequence
  Description of Artificial Sequence: Synthetic oligonucleotide
gagagacaccccagagccctgg

SEQ ID NO: 2865 - DNA, 23 bp, Artificial Sequence
  Description of Artificial Sequence: Synthetic oligonucleotide
tatttcagtgagctgccccatcc

SEQ ID NO: 2866 - DNA, 26 bp, Artificial Sequence
  Description of Artificial Sequence: Synthetic oligonucleotide
tcttcaataaaggaaaccaaggagac

SEQ ID NO: 2867 - DNA, 26 bp, Artificial Sequence
  Description of Artificial Sequence: Synthetic oligonucleotide
tttccaaccactgacagtttaacaac

SEQ ID NO: 2868 - DNA, 25 bp, Artificial Sequence
  Description of Artificial Sequence: Synthetic oligonucleotide
cctccagaccctgacttttccttcg

SEQ ID NO: 2869 - DNA, 25 bp, Artificial Sequence
  Description of Artificial Sequence: Synthetic oligonucleotide
tcgaacctcaccttctgtctagagt

SEQ ID NO: 2870 - DNA, 22 bp, Artificial Sequence
  Description of Artificial Sequence: Synthetic oligonucleotide
gcagggccttgggagattaccc

SEQ ID NO: 2871 - DNA, 20 bp, Artificial Sequence
  Description of Artificial Sequence: Synthetic oligonucleotide
ggtggagcaggagcccacac

SEQ ID NO: 2872 - DNA, 26 bp, Artificial Sequence
  Description of Artificial Sequence: Synthetic oligonucleotide
ttaatttcctctcttgagtgtggctg

SEQ ID NO: 2873 - DNA, 25 bp, Artificial Sequence
  Description of Artificial Sequence: Synthetic oligonucleotide
gcttctttgcttctcaaacacccac

SEQ ID NO: 2874 - DNA, 23 bp, Artificial Sequence
  Description of Artificial Sequence: Synthetic oligonucleotide
ccacatccacttggattccaggg

SEQ ID NO: 2875 - DNA, 22 bp, Artificial Sequence
  Description of Artificial Sequence: Synthetic oligonucleotide
gtcagtggcctcactgtcagcg

SEQ ID NO: 2876 - DNA, 28 bp, Artificial Sequence
  Description of Artificial Sequence: Synthetic oligonucleotide
gctatcacaaataatgctgcaaagacag

SEQ ID NO: 2877 - DNA, 26 bp, Artificial Sequence
  Description of Artificial Sequence: Synthetic oligonucleotide
tgagagacaactgagagacattccac

SEQ ID NO: 2878 - DNA, 23 bp, Artificial Sequence
  Description of Artificial Sequence: Synthetic oligonucleotide
tcttggcccaatctctctccacc

SEQ ID NO: 2879 - DNA, 22 bp, Artificial Sequence
  Description of Artificial Sequence: Synthetic oligonucleotide
actccccccttatggagtcccg

SEQ ID NO: 2880 - DNA, 23 bp, Artificial Sequence
  Description of Artificial Sequence: Synthetic oligonucleotide
gcatatgagggcacacctggttc

SEQ ID NO: 2881 - DNA, 25 bp, Artificial Sequence
  Description of Artificial Sequence: Synthetic oligonucleotide
cttgaatgaaggacaacatgcatgg

SEQ ID NO: 2882 - DNA, 25 bp, Artificial Sequence
  Description of Artificial Sequence: Synthetic oligonucleotide
catcttgaatcctgctggtcactcg

SEQ ID NO: 2883 - DNA, 22 bp, Artificial Sequence
  Description of Artificial Sequence: Synthetic oligonucleotide
ctcccttccagaggtgcagctg

SEQ ID NO: 2884 - DNA, 23 bp, Artificial Sequence
  Description of Artificial Sequence: Synthetic oligonucleotide
atagtggctctcctcgtcgtccg

SEQ ID NO: 2885 - DNA, 28 bp, Artificial Sequence
  Description of Artificial Sequence: Synthetic oligonucleotide
tgagactgtacgaattttatgactgcac

SEQ ID NO: 2886 - DNA, 22 bp, Artificial Sequence
  Description of Artificial Sequence: Synthetic oligonucleotide
gacagtgcccagggctctgatg

SEQ ID NO: 2887 - DNA, 24 bp, Artificial Sequence
  Description of Artificial Sequence: Synthetic oligonucleotide
tggcccattctcctgactctttac

SEQ ID NO: 2888 - DNA, 28 bp, Artificial Sequence
  Description of Artificial Sequence: Synthetic oligonucleotide
gctatatctgctcagagctcacaaatgc

SEQ ID NO: 2889 - DNA, 27 bp, Artificial Sequence
  Description of Artificial Sequence: Synthetic oligonucleotide
ttccagagccagctaagaatagtacag

SEQ ID NO: 2890 - DNA, 21 bp, Artificial Sequence
  Description of Artificial Sequence: Synthetic oligonucleotide
cacaatgacacccacccctcg

SEQ ID NO: 2891 - DNA, 20 bp, Artificial Sequence
  Description of Artificial Sequence: Synthetic oligonucleotide
gacccccattccctgccttt

SEQ ID NO: 2892 - DNA, 28 bp, Artificial Sequence
  Description of Artificial Sequence: Synthetic oligonucleotide
tcagagaactcagaggagtgactcttcc

SEQ ID NO: 2893 - DNA, 24 bp, Artificial Sequence
  Description of Artificial Sequence: Synthetic oligonucleotide
gtcgttttcctggcactgtttctg

SEQ ID NO: 2894 - DNA, 28 bp, Artificial Sequence
  Description of Artificial Sequence: Synthetic oligonucleotide
tccttttacattatttgtctccccagtc

SEQ ID NO: 2895 - DNA, 25 bp, Artificial Sequence
  Description of Artificial Sequence: Synthetic oligonucleotide
agatggggtaaggagacgaatgagg

SEQ ID NO: 2896 - DNA, 22 bp, Artificial Sequence
  Description of Artificial Sequence: Synthetic oligonucleotide
ggctcactcctcatgccattcg

SEQ ID NO: 2897 - DNA, 26 bp, Artificial Sequence
  Description of Artificial Sequence: Synthetic oligonucleotide
ggaaaatgctgctgacttgtttttgc

SEQ ID NO: 2898 - DNA, 21 bp, Artificial Sequence
  Description of Artificial Sequence: Synthetic oligonucleotide
gtcccttcccacaaggccatg

SEQ ID NO: 2899 - DNA, 25 bp, Artificial Sequence
  Description of Artificial Sequence: Synthetic oligonucleotide
taagattcaagacagggcacagtcg

SEQ ID NO: 2900 - DNA, 24 bp, Artificial Sequence
  Description of Artificial Sequence: Synthetic oligonucleotide
cctgcagttgccttcaatgactcc

SEQ ID NO: 2901 - DNA, 28 bp, Artificial Sequence
  Description of Artificial Sequence: Synthetic oligonucleotide
cattctcccttgaacctcaactctatcc

SEQ ID NO: 2902 - DNA, 22 bp, Artificial Sequence
  Description of Artificial Sequence: Synthetic oligonucleotide
gtgggaggggttcagaagcagc

SEQ ID NO: 2903 - DNA, 25 bp, Artificial Sequence
  Description of Artificial Sequence: Synthetic oligonucleotide
tcagaaaaggtaactgggcatgacg

SEQ ID NO: 2904 - DNA, 24 bp, Artificial Sequence
  Description of Artificial Sequence: Synthetic oligonucleotide
gctcaatgatggggaaggaaaagc

SEQ ID NO: 2905 - DNA, 28 bp, Artificial Sequence
  Description of Artificial Sequence: Synthetic oligonucleotide
tgggtgagttactttacttctgtggtcc

SEQ ID NO: 2906 - DNA, 25 bp, Artificial Sequence
  Description of Artificial Sequence: Synthetic oligonucleotide
acactttatttgttccccagtctgc

SEQ ID NO: 2907 - DNA, 26 bp, Artificial Sequence
  Description of Artificial Sequence: Synthetic oligonucleotide
gctccccaaggcatagtttaatatgc

SEQ ID NO: 2908 - DNA, 25 bp, Artificial Sequence
  Description of Artificial Sequence: Synthetic oligonucleotide
tctcttcatccctgttcttcacatc

SEQ ID NO: 2909 - DNA, 19 bp, Artificial Sequence
  Description of Artificial Sequence: Synthetic oligonucleotide
gcggccccaataccatccc

SEQ ID NO: 2910 - DNA, 23 bp, Artificial Sequence
  Description of Artificial Sequence: Synthetic oligonucleotide
gatgactggcgtgctcctaacag

SEQ ID NO: 2911 - DNA, 28 bp, Artificial Sequence
  Description of Artificial Sequence: Synthetic oligonucleotide
cctagtaagagtcatgctgagggaagag

SEQ ID NO: 2912 - DNA, 21 bp, Artificial Sequence
  Description of Artificial Sequence: Synthetic oligonucleotide
ctcgagggcgtttttccttgc

SEQ ID NO: 2913 - DNA, 24 bp, Artificial Sequence
  Description of Artificial Sequence: Synthetic oligonucleotide
cctggtcattgatctggaaaggac

SEQ ID NO: 2914 - DNA, 23 bp, Artificial Sequence
  Description of Artificial Sequence: Synthetic oligonucleotide
tttaggccagatttggtggctcg

SEQ ID NO: 2915 - DNA, 24 bp, Artificial Sequence
  Description of Artificial Sequence: Synthetic oligonucleotide
gagatctacaggcgatcagggagg

SEQ ID NO: 2916 - DNA, 19 bp, Artificial Sequence
  Description of Artificial Sequence: Synthetic oligonucleotide
ggccacgagggagaagcag

SEQ ID NO: 2917 - DNA, 23 bp, Artificial Sequence
  Description of Artificial Sequence: Synthetic oligonucleotide
cctcctgcctcatcatgaccacg

SEQ ID NO: 2918 - DNA, 25 bp, Artificial Sequence
  Description of Artificial Sequence: Synthetic oligonucleotide
tgtacaggagctttggaatactggc

SEQ ID NO: 2919 - DNA, 25 bp, Artificial Sequence
  Description of Artificial Sequence: Synthetic oligonucleotide
ggaaggtggcaatacagaaaaaaac

SEQ ID NO: 2920 - DNA, 27 bp, Artificial Sequence
  Description of Artificial Sequence: Synthetic oligonucleotide
tgctagtatctgtatttggtgctgtgc

SEQ ID NO: 2921 - DNA, 28 bp, Artificial Sequence
  Description of Artificial Sequence: Synthetic oligonucleotide
tcatatcttttggcaccttctagaatgc

SEQ ID NO: 2922 - DNA, 27 bp, Artificial Sequence
  Description of Artificial Sequence: Synthetic oligonucleotide
ggcctgtcctaaggagatgtatgagtg

SEQ ID NO: 2923 - DNA, 22 bp, Artificial Sequence
  Description of Artificial Sequence: Synthetic oligonucleotide
aacagcagcagccgcaacatac

SEQ ID NO: 2924 - DNA, 24 bp, Artificial Sequence
  Description of Artificial Sequence: Synthetic oligonucleotide
cacctgcaacagactcagcacagc

SEQ ID NO: 2925 - DNA, 22 bp, Artificial Sequence
  Description of Artificial Sequence: Synthetic oligonucleotide
gtttttcctgatcccgccctgg

SEQ ID NO: 2926 - DNA, 22 bp, Artificial Sequence
  Description of Artificial Sequence: Synthetic oligonucleotide
gctctgcctctaggacccacac

SEQ ID NO: 2927 - DNA, 28 bp, Artificial Sequence
  Description of Artificial Sequence: Synthetic oligonucleotide
gggttctttgcattcggtatttaatacc

SEQ ID NO: 2928 - DNA, 23 bp, Artificial Sequence
  Description of Artificial Sequence: Synthetic oligonucleotide
ggggggtctgaaaggaagagtcg

SEQ ID NO: 2929 - DNA, 28 bp, Artificial Sequence
  Description of Artificial Sequence: Synthetic oligonucleotide
cctgtcagtggtgacaaataacacttag

SEQ ID NO: 2930 - DNA, 23 bp, Artificial Sequence
  Description of Artificial Sequence: Synthetic oligonucleotide
agactcaggggacagtcccatcc

SEQ ID NO: 2931 - DNA, 21 bp, Artificial Sequence
  Description of Artificial Sequence: Synthetic oligonucleotide
ccgacccccgagagagagatc

SEQ ID NO: 2932 - DNA, 26 bp, Artificial Sequence
  Description of Artificial Sequence: Synthetic oligonucleotide
ttcttgcatacacactggaaaaaaac

SEQ ID NO: 2933 - DNA, 28 bp, Artificial Sequence
  Description of Artificial Sequence: Synthetic oligonucleotide
cctgtttgttgtctaacgaacaatcagc

SEQ ID NO: 2934 - DNA, 22 bp, Artificial Sequence
  Description of Artificial Sequence: Synthetic oligonucleotide
ccccctccttcagacaccctcc

SEQ ID NO: 2935 - DNA, 24 bp, Artificial Sequence
  Description of Artificial Sequence: Synthetic oligonucleotide
ttcccttctgcattcagggtatgg

SEQ ID NO: 2936 - DNA, 25 bp, Artificial Sequence
  Description of Artificial Sequence: Synthetic oligonucleotide
aatggtcatgatgatgcacacaatg

SEQ ID NO: 2937 - DNA, 20 bp, Artificial Sequence
  Description of Artificial Sequence: Synthetic oligonucleotide
ttgaccacgaccttggcccc

SEQ ID NO: 2938 - DNA, 24 bp, Artificial Sequence
  Description of Artificial Sequence: Synthetic oligonucleotide
cacacacctcaattcccattgagg

SEQ ID NO: 2939 - DNA, 25 bp, Artificial Sequence
  Description of Artificial Sequence: Synthetic oligonucleotide
catatgaattttgggacggcatatt

SEQ ID NO: 2940 - DNA, 20 bp, Artificial Sequence
  Description of Artificial Sequence: Synthetic oligonucleotide
cggtctcctccagcccctcc

SEQ ID NO: 2941 - DNA, 23 bp, Artificial Sequence
  Description of Artificial Sequence: Synthetic oligonucleotide
actgtggagggaagggagacctc

SEQ ID NO: 2942 - DNA, 21 bp, Artificial Sequence
  Description of Artificial Sequence: Synthetic oligonucleotide
gccacctcttgaggggtgtcg

SEQ ID NO: 2943 - DNA, 27 bp, Artificial Sequence
  Description of Artificial Sequence: Synthetic oligonucleotide
gctggtataggcaaatgtttacagaaa

SEQ ID NO: 2944 - DNA, 22 bp, Artificial Sequence
  Description of Artificial Sequence: Synthetic oligonucleotide
ctgtcctgggctgggtcctctg

SEQ ID NO: 2945 - DNA, 26 bp, Artificial Sequence
  Description of Artificial Sequence: Synthetic oligonucleotide
gctttgcagacaccattcaatcttat

SEQ ID NO: 2946 - DNA, 23 bp, Artificial Sequence
  Description of Artificial Sequence: Synthetic oligonucleotide
cagcctttgcctgaatcacaaag

SEQ ID NO: 2947 - DNA, 26 bp, Artificial Sequence
  Description of Artificial Sequence: Synthetic oligonucleotide
tctcaaaataaccgtctcatgaggtg

SEQ ID NO: 2948 - DNA, 23 bp, Artificial Sequence
  Description of Artificial Sequence: Synthetic oligonucleotide
tcctgaggttgtttccaggctgc

SEQ ID NO: 2949 - DNA, 28 bp, Artificial Sequence
  Description of Artificial Sequence: Synthetic oligonucleotide
aagcatgacaaacaaaatcatttacctg

SEQ ID NO: 2950 - DNA, 22 bp, Artificial Sequence
  Description of Artificial Sequence: Synthetic oligonucleotide
gcagaaagactcgggtttcccg

SEQ ID NO: 2951 - DNA, 24 bp, Artificial Sequence
  Description of Artificial Sequence: Synthetic oligonucleotide
gaacctggtcagatcccacagaag

SEQ ID NO: 2952 - DNA, 22 bp, Artificial Sequence
  Description of Artificial Sequence: Synthetic oligonucleotide
cccctggaaagggttccaagtg

SEQ ID NO: 2953 - DNA, 26 bp, Artificial Sequence
  Description of Artificial Sequence: Synthetic oligonucleotide
tgtataaatgtgcccaaaagcgttag

SEQ ID NO: 2954 - DNA, 23 bp, Artificial Sequence
  Description of Artificial Sequence: Synthetic oligonucleotide
tctcacctagatggctgcagctc

SEQ ID NO: 2955 - DNA, 21 bp, Artificial Sequence
  Description of Artificial Sequence: Synthetic oligonucleotide
ctcaaccacccttggggatgc

SEQ ID NO: 2956 - DNA, 25 bp, Artificial Sequence
  Description of Artificial Sequence: Synthetic oligonucleotide
gagacaaggtttactggatgtgccg

SEQ ID NO: 2957 - DNA, 24 bp, Artificial Sequence
  Description of Artificial Sequence: Synthetic oligonucleotide
gtgctagagataggctggtcccac

SEQ ID NO: 2958 - DNA, 24 bp, Artificial Sequence
  Description of Artificial Sequence: Synthetic oligonucleotide
actccaagtcctgaggttgtccag

SEQ ID NO: 2959 - DNA, 20 bp, Artificial Sequence
  Description of Artificial Sequence: Synthetic oligonucleotide
caggtggaggggagggatgc

SEQ ID NO: 2960 - DNA, 27 bp, Artificial Sequence
  Description of Artificial Sequence: Synthetic oligonucleotide
ttccatagatttggcccttaaataaag

SEQ ID NO: 2961 - DNA, 20 bp, Artificial Sequence
  Description of Artificial Sequence: Synthetic oligonucleotide
ggaagggtgactccagcggc

SEQ ID NO: 2962 - DNA, 24 bp, Artificial Sequence
  Description of Artificial Sequence: Synthetic oligonucleotide
caggtgggtccagtgtagtcaccg

SEQ ID NO: 2963 - DNA, 27 bp, Artificial Sequence
  Description of Artificial Sequence: Synthetic oligonucleotide
gaatatactggcacataagccaaggag

SEQ ID NO: 2964 - DNA, 26 bp, Artificial Sequence
  Description of Artificial Sequence: Synthetic oligonucleotide
caaatgattagccccatttcacagac

SEQ ID NO: 2965 - DNA, 23 bp, Artificial Sequence
  Description of Artificial Sequence: Synthetic oligonucleotide
caggggtttcccagttgagaagc

SEQ ID NO: 2966 - DNA, 23 bp, Artificial Sequence
  Description of Artificial Sequence: Synthetic oligonucleotide
ttttgttgcagccacccataatg

SEQ ID NO: 2967 - DNA, 20 bp, Artificial Sequence
  Description of Artificial Sequence: Synthetic oligonucleotide
atccctgcacatgccctggc

SEQ ID NO: 2968 - DNA, 22 bp, Artificial Sequence
  Description of Artificial Sequence: Synthetic oligonucleotide
gcctcaaggtggctaagctccg

SEQ ID NO: 2969 - DNA, 27 bp, Artificial Sequence
  Description of Artificial Sequence: Synthetic oligonucleotide
cgttgtataacaggctacctctgtgtc

SEQ ID NO: 2970 - DNA, 26 bp, Artificial Sequence
  Description of Artificial Sequence: Synthetic oligonucleotide
gcagttccaccactaatgtgctttag

SEQ ID NO: 2971 - DNA, 25 bp, Artificial Sequence
  Description of Artificial Sequence: Synthetic oligonucleotide
tgaaacacttccttgaggcttcagg

SEQ ID NO: 2972 - DNA, 28 bp, Artificial Sequence
  Description of Artificial Sequence: Synthetic oligonucleotide
gcaaacaaatttctaaggactgattgtc

SEQ ID NO: 2973 - DNA, 26 bp, Artificial Sequence
  Description of Artificial Sequence: Synthetic oligonucleotide
ggctagtcaagtaaagcagtgggagc

SEQ ID NO: 2974 - DNA, 22 bp, Artificial Sequence
  Description of Artificial Sequence: Synthetic oligonucleotide
cagaggacacgccatagctggc

SEQ ID NO: 2975 - DNA, 28 bp, Artificial Sequence
  Description of Artificial Sequence: Synthetic oligonucleotide
tttgctaacacacacagaaaagaaatgg

SEQ ID NO: 2976 - DNA, 24 bp, Artificial Sequence
  Description of Artificial Sequence: Synthetic oligonucleotide
tcttccctagtgtgcaagtccctc

SEQ ID NO: 2977 - DNA, 27 bp, Artificial Sequence
  Description of Artificial Sequence: Synthetic oligonucleotide
caggaaattcttcttcacagcttttgc

SEQ ID NO: 2978 - DNA, 22 bp, Artificial Sequence
  Description of Artificial Sequence: Synthetic oligonucleotide
cctctcccggtgtctgattccc

SEQ ID NO: 2979 - DNA, 26 bp, Artificial Sequence
  Description of Artificial Sequence: Synthetic oligonucleotide
tgggggaatattcatctatacccagg

SEQ ID NO: 2980 - DNA, 18 bp, Artificial Sequence
  Description of Artificial Sequence: Synthetic oligonucleotide
gcccggccctgatagccg

SEQ ID NO: 2981 - DNA, 20 bp, Artificial Sequence
  Description of Artificial Sequence: Synthetic oligonucleotide
cagcctccccagggtctcag

SEQ ID NO: 2982 - DNA, 29 bp, Artificial Sequence
  Description of Artificial Sequence: Synthetic oligonucleotide
ccatgtcactgaatccaacagtacattac

SEQ ID NO: 2983 - DNA, 24 bp, Artificial Sequence
  Description of Artificial Sequence: Synthetic oligonucleotide
cattgctttgtcccagcaagttgc

SEQ ID NO: 2984 - DNA, 19 bp, Artificial Sequence
  Description of Artificial Sequence: Synthetic oligonucleotide
gggctgtagggggcgaccg

SEQ ID NO: 2985 - DNA, 23 bp, Artificial Sequence
  Description of Artificial Sequence: Synthetic oligonucleotide
cctggtttgggtcaggtattgcg

SEQ ID NO: 2986 - DNA, 22 bp, Artificial Sequence
  Description of Artificial Sequence: Synthetic oligonucleotide
tttccttcaaaagcgggctgtg

SEQ ID NO: 2987 - DNA, 26 bp, Artificial Sequence
  Description of Artificial Sequence: Synthetic oligonucleotide
aaagggaaatgtgaactatcttgctc

SEQ ID NO: 2988 - DNA, 28 bp, Artificial Sequence
  Description of Artificial Sequence: Synthetic oligonucleotide
tttgatcattacaagaacggtatgaaag

SEQ ID NO: 2989 - DNA, 25 bp, Artificial Sequence
  Description of Artificial Sequence: Synthetic oligonucleotide
cctttgcagaaacaaagtcagggtt

SEQ ID NO: 2990 - DNA, 20 bp, Artificial Sequence
  Description of Artificial Sequence: Synthetic oligonucleotide
gggagaggacggccattccg

SEQ ID NO: 2991 - DNA, 27 bp, Artificial Sequence
  Description of Artificial Sequence: Synthetic oligonucleotide
tttttaacattgtattaggctgtgccg

SEQ ID NO: 2992 - DNA, 23 bp, Artificial Sequence
  Description of Artificial Sequence: Synthetic oligonucleotide
tgttacctagcccctttgccacg

SEQ ID NO: 2993 - DNA, 20 bp, Artificial Sequence
  Description of Artificial Sequence: Synthetic oligonucleotide
gtggggaagccgaaaggagg

SEQ ID NO: 2994 - DNA, 22 bp, Artificial Sequence
  Description of Artificial Sequence: Synthetic oligonucleotide
gcatggaagggcaggtctgaag

SEQ ID NO: 2995 - DNA, 24 bp, Artificial Sequence
  Description of Artificial Sequence: Synthetic oligonucleotide
ctctgtcacccatgctgtagttcc

SEQ ID NO: 2996 - DNA, 28 bp, Artificial Sequence
  Description of Artificial Sequence: Synthetic oligonucleotide
ggggtttcagattcactctactgaagac

SEQ ID NO: 2997 - DNA, 22 bp, Artificial Sequence
  Description of Artificial Sequence: Synthetic oligonucleotide
gatttccaaggacccagacccg

SEQ ID NO: 2998 - DNA, 23 bp, Artificial Sequence
  Description of Artificial Sequence: Synthetic oligonucleotide
cagctccactgcaatggattccc

SEQ ID NO: 2999 - DNA, 27 bp, Artificial Sequence
  Description of Artificial Sequence: Synthetic oligonucleotide
tgttacagacaattcagactgcaaaat

SEQ ID NO: 3000 - DNA, 23 bp, Artificial Sequence
  Description of Artificial Sequence: Synthetic oligonucleotide
agggtagaagcccagaacccagc

SEQ ID NO: 3001 - DNA, 29 bp, Artificial Sequence
  Description of Artificial Sequence: Synthetic oligonucleotide
ccccagagtcagtttctatcatatcatcg

SEQ ID NO: 3002 - DNA, 22 bp, Artificial Sequence
  Description of Artificial Sequence: Synthetic oligonucleotide
agaagcagcagcaccagggaag

SEQ ID NO: 3003 - DNA, 23 bp, Artificial Sequence
  Description of Artificial Sequence: Synthetic oligonucleotide
ggtgaggatgcaagatgcaagtg

SEQ ID NO: 3004 - DNA, 26 bp, Artificial Sequence
  Description of Artificial Sequence: Synthetic oligonucleotide
aaaatatgtggtcaaagaaaaggggg

SEQ ID NO: 3005 - DNA, 20 bp, Artificial Sequence
  Description of Artificial Sequence: Synthetic oligonucleotide
accacctcctgccccacctc

SEQ ID NO: 3006 - DNA, 23 bp, Artificial Sequence
  Description of Artificial Sequence: Synthetic oligonucleotide
ccgcttttgaaggaaaatgaggg

SEQ ID NO: 3007 - DNA, 28 bp, Artificial Sequence
  Description of Artificial Sequence: Synthetic oligonucleotide
agaagtgtggagaaggaatcactagagg

SEQ ID NO: 3008 - DNA, 22 bp, Artificial Sequence
  Description of Artificial Sequence: Synthetic oligonucleotide
ggctggactgttcccacactcg

SEQ ID NO: 3009 - DNA, 20 bp, Artificial Sequence
  Description of Artificial Sequence: Synthetic oligonucleotide
gccccagaaccccttccacg

SEQ ID NO: 3010 - DNA, 20 bp, Artificial Sequence
  Description of Artificial Sequence: Synthetic oligonucleotide
gtagccccctgtgacccccc

SEQ ID NO: 3011 - DNA, 24 bp, Artificial Sequence
  Description of Artificial Sequence: Synthetic oligonucleotide
actagggtgaggcctcagaagacg

SEQ ID NO: 3012 - DNA, 22 bp, Artificial Sequence
  Description of Artificial Sequence: Synthetic oligonucleotide
aaatgagggcagtcccactccg

SEQ ID NO: 3013 - DNA, 24 bp, Artificial Sequence
  Description of Artificial Sequence: Synthetic oligonucleotide
ggaatctgtgcttggtcagtggag

SEQ ID NO: 3014 - DNA, 27 bp, Artificial Sequence
  Description of Artificial Sequence: Synthetic oligonucleotide
tggcactatctgtaccatcatacaacc

SEQ ID NO: 3015 - DNA, 20 bp, Artificial Sequence
  Description of Artificial Sequence: Synthetic oligonucleotide
ctgaaggcaggccaacgtgc

SEQ ID NO: 3016 - DNA, 28 bp, Artificial Sequence
  Description of Artificial Sequence: Synthetic oligonucleotide
ggaaggggttaacagaagaagtcagtgg

SEQ ID NO: 3017 - DNA, 29 bp, Artificial Sequence
  Description of Artificial Sequence: Synthetic oligonucleotide
ggattgtaatattgccagctttgtaaagc

SEQ ID NO: 3018 - DNA, 24 bp, Artificial Sequence
  Description of Artificial Sequence: Synthetic oligonucleotide
catcgggacctaggtgtgttctcg

SEQ ID NO: 3019 - DNA, 23 bp, Artificial Sequence
  Description of Artificial Sequence: Synthetic oligonucleotide
gagggtttccctggacacatctg

SEQ ID NO: 3020 - DNA, 18 bp, Artificial Sequence
  Description of Artificial Sequence: Synthetic oligonucleotide
gggacagagcgcgtgcgc

SEQ ID NO: 3021 - DNA, 21 bp, Artificial Sequence
  Description of Artificial Sequence: Synthetic oligonucleotide
atgaggccctgcagggaaacg

SEQ ID NO: 3022 - DNA, 29 bp, Artificial Sequence
  Description of Artificial Sequence: Synthetic oligonucleotide
cattcaacaaggacagagtgattctaaac

SEQ ID NO: 3023 - DNA, 24 bp, Artificial Sequence
  Description of Artificial Sequence: Synthetic oligonucleotide
caggtgagaagaggaggaggcagg

SEQ ID NO: 3024 - DNA, 20 bp, Artificial Sequence
  Description of Artificial Sequence: Synthetic oligonucleotide
caggggcaggtgggcattac

SEQ ID NO: 3025 - DNA, 25 bp, Artificial Sequence
  Description of Artificial Sequence: Synthetic oligonucleotide
aataccctacctggttgttgtgagc

SEQ ID NO: 3026 - DNA, 28 bp, Artificial Sequence
  Description of Artificial Sequence: Synthetic oligonucleotide
ccctcgttctctaatcaattatctttgc

SEQ ID NO: 3027 - DNA, 22 bp, Artificial Sequence
  Description of Artificial Sequence: Synthetic oligonucleotide
aacaaaggcaaaaacgcggacc

SEQ ID NO: 3028 - DNA, 26 bp, Artificial Sequence
  Description of Artificial Sequence: Synthetic oligonucleotide
gttaaagcagcagcctagattcagag

SEQ ID NO: 3029 - DNA, 20 bp, Artificial Sequence
  Description of Artificial Sequence: Synthetic oligonucleotide
gccaggggctctcctctccc

SEQ ID NO: 3030 - DNA, 20 bp, Artificial Sequence
  Description of Artificial Sequence: Synthetic oligonucleotide
cctgctctgctggggtccag

SEQ ID NO: 3031 - DNA, 22 bp, Artificial Sequence
  Description of Artificial Sequence: Synthetic oligonucleotide
caccaggggaagctttcacaag

SEQ ID NO: 3032 - DNA, 22 bp, Artificial Sequence
  Description of Artificial Sequence: Synthetic oligonucleotide
ggtggaattgtttggggacaac

SEQ ID NO: 3033 - DNA, 28 bp, Artificial Sequence
  Description of Artificial Sequence: Synthetic oligonucleotide
ttcttttgatggtcttaagaaggagaac

SEQ ID NO: 3034 - DNA, 23 bp, Artificial Sequence
  Description of Artificial Sequence: Synthetic oligonucleotide
gctcagactttgacttccccgac

SEQ ID NO: 3035 - DNA, 29 bp, Artificial Sequence
  Description of Artificial Sequence: Synthetic oligonucleotide
ggcaaatgaactaaatctttcctgatagc

SEQ ID NO: 3036 - DNA, 19 bp, Artificial Sequence
  Description of Artificial Sequence: Synthetic oligonucleotide
cctgctgcaggcggacacg

SEQ ID NO: 3037 - DNA, 23 bp, Artificial Sequence
  Description of Artificial Sequence: Synthetic oligonucleotide
agagatctggggatttcggctca

SEQ ID NO: 3038 - DNA, 19 bp, Artificial Sequence
  Description of Artificial Sequence: Synthetic oligonucleotide
gccaggcttgtccacccca

SEQ ID NO: 3039 - DNA, 24 bp, Artificial Sequence
  Description of Artificial Sequence: Synthetic oligonucleotide
cttcaaggaagactgggaaatggc

SEQ ID NO: 3040 - DNA, 24 bp, Artificial Sequence
  Description of Artificial Sequence: Synthetic oligonucleotide
acagagacaccctcaaaggacgag

SEQ ID NO: 3041 - DNA, 22 bp, Artificial Sequence
  Description of Artificial Sequence: Synthetic oligonucleotide
ccctgaaggcacaggtaaccca

SEQ ID NO: 3042 - DNA, 26 bp, Artificial Sequence
  Description of Artificial Sequence: Synthetic oligonucleotide
agacttgggaggtgatgtcatataac

SEQ ID NO: 3043 - DNA, 24 bp, Artificial Sequence
  Description of Artificial Sequence: Synthetic oligonucleotide
tgagggtgtcaggagatgaggaat

SEQ ID NO: 3044 - DNA, 18 bp, Artificial Sequence
  Description of Artificial Sequence: Synthetic oligonucleotide
ccctcatggaccccggac

SEQ ID NO: 3045 - DNA, 27 bp, Artificial Sequence
  Description of Artificial Sequence: Synthetic oligonucleotide
cacctccttcaaagcatctgattctac

SEQ ID NO: 3046 - DNA, 25 bp, Artificial Sequence
  Description of Artificial Sequence: Synthetic oligonucleotide
cctcccacttaagagtgaggacacc

SEQ ID NO: 3047 - DNA, 23 bp, Artificial Sequence
  Description of Artificial Sequence: Synthetic oligonucleotide
ctgtctgtcaccacccccatttc

SEQ ID NO: 3048 - DNA, 23 bp, Artificial Sequence
  Description of Artificial Sequence: Synthetic oligonucleotide
ctgtctgtcaccacccccatttc

SEQ ID NO: 3049 - DNA, 20 bp, Artificial Sequence
  Description of Artificial Sequence: Synthetic oligonucleotide
gaccagccccttgtcagggc

SEQ ID NO: 3050 - DNA, 28 bp, Artificial Sequence
  Description of Artificial Sequence: Synthetic oligonucleotide
ttgagttgcttactatgttctaggcacg

SEQ ID NO: 3051 - DNA, 24 bp, Artificial Sequence
  Description of Artificial Sequence: Synthetic oligonucleotide
caagtgttggtgcctctttgtgcg

SEQ ID NO: 3052 - DNA, 24 bp, Artificial Sequence
  Description of Artificial Sequence: Synthetic oligonucleotide
gaaaggaagcagggatgaagtggg

SEQ ID NO: 3053 - DNA, 21 bp, Artificial Sequence
  Description of Artificial Sequence: Synthetic oligonucleotide
gccttggactgagccaggctg

SEQ ID NO: 3054 - DNA, 29 bp, Artificial Sequence
  Description of Artificial Sequence: Synthetic oligonucleotide
gcatgaatccttaatattgaagagaccag

SEQ ID NO: 3055 - DNA, 23 bp, Artificial Sequence
  Description of Artificial Sequence: Synthetic oligonucleotide
ttgggaacgcacagtttttcacc

SEQ ID NO: 3056 - DNA, 23 bp, Artificial Sequence
  Description of Artificial Sequence: Synthetic oligonucleotide
tgttgcacagggaccaggtatgg

SEQ ID NO: 3057 - DNA, 23 bp, Artificial Sequence
  Description of Artificial Sequence: Synthetic oligonucleotide
cgcttgttagcacccactgaatg

SEQ ID NO: 3058 - DNA, 23 bp, Artificial Sequence
  Description of Artificial Sequence: Synthetic oligonucleotide
ggagtgaaagagcctccaggacc

SEQ ID NO: 3059 - DNA, 24 bp, Artificial Sequence
  Description of Artificial Sequence: Synthetic oligonucleotide
ctagggtgatgtaggggatgcacc

SEQ ID NO: 3060 - DNA, 22 bp, Artificial Sequence
  Description of Artificial Sequence: Synthetic oligonucleotide
gggtggcttactccaggcaacc

SEQ ID NO: 3061 - DNA, 22 bp, Artificial Sequence
  Description of Artificial Sequence: Synthetic oligonucleotide
caaggtccggcagctcttcatg

SEQ ID NO: 3062 - DNA, 24 bp, Artificial Sequence
  Description of Artificial Sequence: Synthetic oligonucleotide
ggtaagtgctggccttccttcctt

SEQ ID NO: 3063 - DNA, 19 bp, Artificial Sequence
  Description of Artificial Sequence: Synthetic oligonucleotide
agtgagggggaccctgggc

SEQ ID NO: 3064 - DNA, 27 bp, Artificial Sequence
  Description of Artificial Sequence: Synthetic oligonucleotide
tctacaatggcattcaataaagtgcat

SEQ ID NO: 3065 - DNA, 24 bp, Artificial Sequence
  Description of Artificial Sequence: Synthetic oligonucleotide
gacagacaacgcgtggtttttctg

SEQ ID NO: 3066 - DNA, 22 bp, Artificial Sequence
  Description of Artificial Sequence: Synthetic oligonucleotide
aggccatgaccctgaaagcagg

SEQ ID NO: 3067 - DNA, 18 bp, Artificial Sequence
  Description of Artificial Sequence: Synthetic oligonucleotide
ggcccttgtggcagcagc

SEQ ID NO: 3068 - DNA, 24 bp, Artificial Sequence
  Description of Artificial Sequence: Synthetic oligonucleotide
ggagagctaggtccatctccctcc

SEQ ID NO: 3069 - DNA, 29 bp, Artificial Sequence
  Description of Artificial Sequence: Synthetic oligonucleotide
ccagaactctactgaaatcaagtctggac

SEQ ID NO: 3070 - DNA, 23 bp, Artificial Sequence
  Description of Artificial Sequence: Synthetic oligonucleotide
caagagaagaatgacagcaagcg

SEQ ID NO: 3071 - DNA, 20 bp, Artificial Sequence
  Description of Artificial Sequence: Synthetic oligonucleotide
cgatgctgaggatgggcacg

SEQ ID NO: 3072 - DNA, 27 bp, Artificial Sequence
  Description of Artificial Sequence: Synthetic oligonucleotide
cccatatgaattgatcagagaagaatg

SEQ ID NO: 3073 - DNA, 27 bp, Artificial Sequence
  Description of Artificial Sequence: Synthetic oligonucleotide
ctgtcttctcctactatccagcttccg

SEQ ID NO: 3074 - DNA, 25 bp, Artificial Sequence
  Description of Artificial Sequence: Synthetic oligonucleotide
acctgttacactgcctcccacttac

SEQ ID NO: 3075 - DNA, 25 bp, Artificial Sequence
  Description of Artificial Sequence: Synthetic oligonucleotide
ccatctagttatcctttcctccccg

SEQ ID NO: 3076 - DNA, 23 bp, Artificial Sequence
  Description of Artificial Sequence: Synthetic oligonucleotide
tctctgagcagggtagcagggac

SEQ ID NO: 3077 - DNA, 23 bp, Artificial Sequence
  Description of Artificial Sequence: Synthetic oligonucleotide
aaaaaccgatgccccacttaggg

SEQ ID NO: 3078 - DNA, 29 bp, Artificial Sequence
  Description of Artificial Sequence: Synthetic oligonucleotide
ggatacaggggaaaaaagatagaaatgtg

SEQ ID NO: 3079 - DNA, 23 bp, Artificial Sequence
  Description of Artificial Sequence: Synthetic oligonucleotide
tctctagacccccctgcatgttg

SEQ ID NO: 3080 - DNA, 24 bp, Artificial Sequence
  Description of Artificial Sequence: Synthetic oligonucleotide
tctctcccttccctgattccagtg

SEQ ID NO: 3081 - DNA, 19 bp, Artificial Sequence
  Description of Artificial Sequence: Synthetic oligonucleotide
gctgggcgtgctggcatac

SEQ ID NO: 3082 - DNA, 23 bp, Artificial Sequence
  Description of Artificial Sequence: Synthetic oligonucleotide
tacaacctcacggtgctgtcccg

SEQ ID NO: 3083 - DNA, 24 bp, Artificial Sequence
  Description of Artificial Sequence: Synthetic oligonucleotide
tcacccaaactcacttcccaaacc

SEQ ID NO: 3084 - DNA, 21 bp, Artificial Sequence
  Description of Artificial Sequence: Synthetic oligonucleotide
caaccccttcctcagtccccg

SEQ ID NO: 3085 - DNA, 24 bp, Artificial Sequence
  Description of Artificial Sequence: Synthetic oligonucleotide
cagggtctctcctcaggagagaag

SEQ ID NO: 3086 - DNA, 30 bp, Artificial Sequence
  Description of Artificial Sequence: Synthetic oligonucleotide
cgcagtctgatttttactgtctcacatagc

SEQ ID NO: 3087 - DNA, 20 bp, Artificial Sequence
  Description of Artificial Sequence: Synthetic oligonucleotide
tcccaccagcacccaatccg

SEQ ID NO: 3088 - DNA, 26 bp, Artificial Sequence
  Description of Artificial Sequence: Synthetic oligonucleotide
aaagtcacattcaaatgcacaaatgc

SEQ ID NO: 3089 - DNA, 30 bp, Artificial Sequence
  Description of Artificial Sequence: Synthetic oligonucleotide
cgcaaagaaatagcactcagacataaattc

SEQ ID NO: 3090 - DNA, 27 bp, Artificial Sequence
  Description of Artificial Sequence: Synthetic oligonucleotide
aatgtgaaaaaatgtttcatttccagc

SEQ ID NO: 3091 - DNA, 27 bp, Artificial Sequence
  Description of Artificial Sequence: Synthetic oligonucleotide
catgctcattgctgatacatagaaaag

SEQ ID NO: 3092 - DNA, 28 bp, Artificial Sequence
  Description of Artificial Sequence: Synthetic oligonucleotide
aaaaaaagtgatgagacatgacttggtg

SEQ ID NO: 3093 - DNA, 20 bp, Artificial Sequence
  Description of Artificial Sequence: Synthetic oligonucleotide
actgggcagcagcccagggg

SEQ ID NO: 3094 - DNA, 27 bp, Artificial Sequence
  Description of Artificial Sequence: Synthetic oligonucleotide
tttccatgttaatcaatcaagtccatc

SEQ ID NO: 3095 - DNA, 26 bp, Artificial Sequence
  Description of Artificial Sequence: Synthetic oligonucleotide
tgcaaagctaggagttcatgaagtgc

SEQ ID NO: 3096 - DNA, 22 bp, Artificial Sequence
  Description of Artificial Sequence: Synthetic oligonucleotide
atagtcctctgcccctgtcccc

SEQ ID NO: 3097 - DNA, 23 bp, Artificial Sequence
  Description of Artificial Sequence: Synthetic oligonucleotide
ttgtcttcctcctctgtgggagc

SEQ ID NO: 3098 - DNA, 27 bp, Artificial Sequence
  Description of Artificial Sequence: Synthetic oligonucleotide
acacttgaaatatggcaagtacgactg

SEQ ID NO: 3099 - DNA, 21 bp, Artificial Sequence
  Description of Artificial Sequence: Synthetic oligonucleotide
gcagcccccaggtatcaggac

SEQ ID NO: 3100 - DNA, 28 bp, Artificial Sequence
  Description of Artificial Sequence: Synthetic oligonucleotide
gagaagctgcagtgagttttatgttctg

SEQ ID NO: 3101 - DNA, 24 bp, Artificial Sequence
  Description of Artificial Sequence: Synthetic oligonucleotide
ttcagctttgacaatattgggggg

SEQ ID NO: 3102 - DNA, 24 bp, Artificial Sequence
  Description of Artificial Sequence: Synthetic oligonucleotide
ttgccaaggtcaccaaatctttat

SEQ ID NO: 3103 - DNA, 23 bp, Artificial Sequence
  Description of Artificial Sequence: Synthetic oligonucleotide
aggccgagaagtgaacacagctg

SEQ ID NO: 3104 - DNA, 22 bp, Artificial Sequence
  Description of Artificial Sequence: Synthetic oligonucleotide
actctgaaatcgcggtgcagtc

SEQ ID NO: 3105 - DNA, 21 bp, Artificial Sequence
  Description of Artificial Sequence: Synthetic oligonucleotide
agcggcatctcagatcccacg

SEQ ID NO: 3106 - DNA, 26 bp, Artificial Sequence
  Description of Artificial Sequence: Synthetic oligonucleotide
tttgacttgggaacactttctcaagc

SEQ ID NO: 3107 - DNA, 24 bp, Artificial Sequence
  Description of Artificial Sequence: Synthetic oligonucleotide
aagatcaggaacccacaggaagcc

SEQ ID NO: 3108 - DNA, 25 bp, Artificial Sequence
  Description of Artificial Sequence: Synthetic oligonucleotide
cattctgcagaaacctgtcaccatc

SEQ ID NO: 3109 - DNA, 22 bp, Artificial Sequence
  Description of Artificial Sequence: Synthetic oligonucleotide
gatcacatgcttcagagggcag

SEQ ID NO: 3110 - DNA, 21 bp, Artificial Sequence
  Description of Artificial Sequence: Synthetic oligonucleotide
ccccatccacctcaaagtgcc

SEQ ID NO: 3111 - DNA, 28 bp, Artificial Sequence
  Description of Artificial Sequence: Synthetic oligonucleotide
gggcctgactcttagaaaacactctatc

SEQ ID NO: 3112 - DNA, 29 bp, Artificial Sequence
  Description of Artificial Sequence: Synthetic oligonucleotide
tgatcaagggactagaacactaaactggg

SEQ ID NO: 3113 - DNA, 22 bp, Artificial Sequence
  Description of Artificial Sequence: Synthetic oligonucleotide
ggcacatcttgatctggaaagc

SEQ ID NO: 3114 - DNA, 21 bp, Artificial Sequence
  Description of Artificial Sequence: Synthetic oligonucleotide
cttggctccagcgagaggccg

SEQ ID NO: 3115 - DNA, 21 bp, Artificial Sequence
  Description of Artificial Sequence: Synthetic oligonucleotide
gtgtgtgtgagtggctggggc

SEQ ID NO: 3116 - DNA, 24 bp, Artificial Sequence
  Description of Artificial Sequence: Synthetic oligonucleotide
ctgatggatggtaaggcagtgctg

SEQ ID NO: 3117 - DNA, 19 bp, Artificial Sequence
  Description of Artificial Sequence: Synthetic oligonucleotide
gtccgatggtgccttggcg

SEQ ID NO: 3118 - DNA, 29 bp, Artificial Sequence
  Description of Artificial Sequence: Synthetic oligonucleotide
gccactaggagaattaaaaccataagctg

SEQ ID NO: 3119 - DNA, 26 bp, Artificial Sequence
  Description of Artificial Sequence: Synthetic oligonucleotide
tcaaaatgctgcatagaatgtcagac

SEQ ID NO: 3120 - DNA, 23 bp, Artificial Sequence
  Description of Artificial Sequence: Synthetic oligonucleotide
gcaataggttttgaggggcatgg

SEQ ID NO: 3121 - DNA, 23 bp, Artificial Sequence
  Description of Artificial Sequence: Synthetic oligonucleotide
ttcccctccttttgctcaagaac

SEQ ID NO: 3122 - DNA, 21 bp, Artificial Sequence
  Description of Artificial Sequence: Synthetic oligonucleotide
caagtgcccccattctgacac

SEQ ID NO: 3123 - DNA, 27 bp, Artificial Sequence
  Description of Artificial Sequence: Synthetic oligonucleotide
agtgcaggggggtaaaaataaataacc

SEQ ID NO: 3124 - DNA, 18 bp, Artificial Sequence
  Description of Artificial Sequence: Synthetic oligonucleotide
gccccagccctggcttgg

SEQ ID NO: 3125 - DNA, 24 bp, Artificial Sequence
  Description of Artificial Sequence: Synthetic oligonucleotide
gttttgccaggtgagtgtgacaac

SEQ ID NO: 3126 - DNA, 23 bp, Artificial Sequence
  Description of Artificial Sequence: Synthetic oligonucleotide
cttgtgtgcttgctgggatcatg

SEQ ID NO: 3127 - DNA, 23 bp, Artificial Sequence
  Description of Artificial Sequence: Synthetic oligonucleotide
gacctgagaagatgccctggttc

SEQ ID NO: 3128 - DNA, 26 bp, Artificial Sequence
  Description of Artificial Sequence: Synthetic oligonucleotide
aatgtgcatcatgagaaaagaaatgc

SEQ ID NO: 3129 - DNA, 23 bp, Artificial Sequence
  Description of Artificial Sequence: Synthetic oligonucleotide
aaccaggtgttgatctgggcttc

SEQ ID NO: 3130 - DNA, 23 bp, Artificial Sequence
  Description of Artificial Sequence: Synthetic oligonucleotide
tgcgctgcacttaacatttgctg

SEQ ID NO: 3131 - DNA, 24 bp, Artificial Sequence
  Description of Artificial Sequence: Synthetic oligonucleotide
catggtctcaggcacctggattag

SEQ ID NO: 3132 - DNA, 24 bp, Artificial Sequence
  Description of Artificial Sequence: Synthetic oligonucleotide
tataggggaggagtggaggagggg

SEQ ID NO: 3133 - DNA, 22 bp, Artificial Sequence
  Description of Artificial Sequence: Synthetic oligonucleotide
cagagaagtcttaggcccggcc

SEQ ID NO: 3134 - DNA, 20 bp, Artificial Sequence
  Description of Artificial Sequence: Synthetic oligonucleotide
ccagcaggccttcaccagat

SEQ ID NO: 3135 - DNA, 23 bp, Artificial Sequence
  Description of Artificial Sequence: Synthetic oligonucleotide
agtgatgtctgaggtggccacag

SEQ ID NO: 3136 - DNA, 22 bp, Artificial Sequence
  Description of Artificial Sequence: Synthetic oligonucleotide
ctaccgctgccaccaatggtac

SEQ ID NO: 3137 - DNA, 20 bp, Artificial Sequence
  Description of Artificial Sequence: Synthetic oligonucleotide
ctggtgctgggggtgacagc

SEQ ID NO: 3138 - DNA, 30 bp, Artificial Sequence
  Description of Artificial Sequence: Synthetic oligonucleotide
gcaagaggatcacctaggagagtaaattag

SEQ ID NO: 3139 - DNA, 23 bp, Artificial Sequence
  Description of Artificial Sequence: Synthetic oligonucleotide
cagacaccaggaggaaaggggtg

SEQ ID NO: 3140 - DNA, 20 bp, Artificial Sequence
  Description of Artificial Sequence: Synthetic oligonucleotide
gccactgctggataccccag

SEQ ID NO: 3141 - DNA, 24 bp, Artificial Sequence
  Description of Artificial Sequence: Synthetic oligonucleotide
ggctcttcagattccttcatggcc

SEQ ID NO: 3142 - DNA, 23 bp, Artificial Sequence
  Description of Artificial Sequence: Synthetic oligonucleotide
tgatgtcaggttccagggtcagc

SEQ ID NO: 3143 - DNA, 22 bp, Artificial Sequence
  Description of Artificial Sequence: Synthetic oligonucleotide
gatacgcgtggggtccttacag

SEQ ID NO: 3144 - DNA, 23 bp, Artificial Sequence
  Description of Artificial Sequence: Synthetic oligonucleotide
ggtaagttgggcctggggttttg

SEQ ID NO: 3145 - DNA, 24 bp, Artificial Sequence
  Description of Artificial Sequence: Synthetic oligonucleotide
ccttcaaccccattaggccataat

SEQ ID NO: 3146 - DNA, 22 bp, Artificial Sequence
  Description of Artificial Sequence: Synthetic oligonucleotide
gaatggaacggtggctctgaag

SEQ ID NO: 3147 - DNA, 21 bp, Artificial Sequence
  Description of Artificial Sequence: Synthetic oligonucleotide
ctcctggcctcatgacccagc

SEQ ID NO: 3148 - DNA, 25 bp, Artificial Sequence
  Description of Artificial Sequence: Synthetic oligonucleotide
gcatttaccccttagtactggggcg

SEQ ID NO: 3149 - DNA, 27 bp, Artificial Sequence
  Description of Artificial Sequence: Synthetic oligonucleotide
cattttgtgtagtgctggattggtagc

SEQ ID NO: 3150 - DNA, 22 bp, Artificial Sequence
  Description of Artificial Sequence: Synthetic oligonucleotide
gtgttgggcggaacagtggacg

SEQ ID NO: 3151 - DNA, 22 bp, Artificial Sequence
  Description of Artificial Sequence: Synthetic oligonucleotide
ccagcaactgtcgacgtcacac

SEQ ID NO: 3152 - DNA, 24 bp, Artificial Sequence
  Description of Artificial Sequence: Synthetic oligonucleotide
gcaaggagggtatggggaatgttc

SEQ ID NO: 3153 - DNA, 24 bp, Artificial Sequence
  Description of Artificial Sequence: Synthetic oligonucleotide
gaaatgggacatggaggaacacac

SEQ ID NO: 3154 - DNA, 24 bp, Artificial Sequence
  Description of Artificial Sequence: Synthetic oligonucleotide
gagaatgtaagaggggcaagggtg

SEQ ID NO: 3155 - DNA, 24 bp, Artificial Sequence
  Description of Artificial Sequence: Synthetic oligonucleotide
ctgcgactgcacacgaggtttacg

SEQ ID NO: 3156 - DNA, 22 bp, Artificial Sequence
  Description of Artificial Sequence: Synthetic oligonucleotide
ctcaacttgctcaccctgccac

SEQ ID NO: 3157 - DNA, 22 bp, Artificial Sequence
  Description of Artificial Sequence: Synthetic oligonucleotide
ggcactgggggaaacttaggcg

SEQ ID NO: 3158 - DNA, 22 bp, Artificial Sequence
  Description of Artificial Sequence: Synthetic oligonucleotide
cagcctcggactccatctctcg

SEQ ID NO: 3159 - DNA, 23 bp, Artificial Sequence
  Description of Artificial Sequence: Synthetic oligonucleotide
cttggtcccttctgacgtcaccg

SEQ ID NO: 3160 - DNA, 23 bp, Artificial Sequence
  Description of Artificial Sequence: Synthetic oligonucleotide
gctttgcgggttctgtgtcttac

SEQ ID NO: 3161 - DNA, 25 bp, Artificial Sequence
  Description of Artificial Sequence: Synthetic oligonucleotide
cctaccaggctgacacactgatctc

SEQ ID NO: 3162 - DNA, 25 bp, Artificial Sequence
  Description of Artificial Sequence: Synthetic oligonucleotide
caaggggaacaaatgcatactcagg

SEQ ID NO: 3163 - DNA, 22 bp, Artificial Sequence
  Description of Artificial Sequence: Synthetic oligonucleotide
gtgtgaggggtccttgtgctgc

SEQ ID NO: 3164 - DNA, 25 bp, Artificial Sequence
  Description of Artificial Sequence: Synthetic oligonucleotide
gccagtttggatctgaaggtggtag

SEQ ID NO: 3165 - DNA, 23 bp, Artificial Sequence
  Description of Artificial Sequence: Synthetic oligonucleotide
gcaaacctcctgagtgggattcc

SEQ ID NO: 3166 - DNA, 22 bp, Artificial Sequence
  Description of Artificial Sequence: Synthetic oligonucleotide
gaggcaccaggagatgttccac

SEQ ID NO: 3167 - DNA, 21 bp, Artificial Sequence
  Description of Artificial Sequence: Synthetic oligonucleotide
cccctcccagtcactcctgag

SEQ ID NO: 3168 - DNA, 21 bp, Artificial Sequence
  Description of Artificial Sequence: Synthetic oligonucleotide
gtgctcctgctcctgtgggtg

SEQ ID NO: 3169 - DNA, 19 bp, Artificial Sequence
  Description of Artificial Sequence: Synthetic oligonucleotide
ggcagagccccggagagtg

SEQ ID NO: 3170 - DNA, 24 bp, Artificial Sequence
  Description of Artificial Sequence: Synthetic oligonucleotide
tttctgcttagctggcaggactcc

SEQ ID NO: 3171 - DNA, 26 bp, Artificial Sequence
  Description of Artificial Sequence: Synthetic oligonucleotide
aaaagatggcagtattagcaatctca

SEQ ID NO: 3172 - DNA, 20 bp, Artificial Sequence
  Description of Artificial Sequence: Synthetic oligonucleotide
cccagcttccatcccctgtc

SEQ ID NO: 3173 - DNA, 28 bp, Artificial Sequence
  Description of Artificial Sequence: Synthetic oligonucleotide
cagagatttttaaggccagagattgtac

SEQ ID NO: 3174 - DNA, 23 bp, Artificial Sequence
  Description of Artificial Sequence: Synthetic oligonucleotide
gctctgccccaggtttctgaacg

SEQ ID NO: 3175 - DNA, 22 bp, Artificial Sequence
  Description of Artificial Sequence: Synthetic oligonucleotide
ccgagctcatcagcagtgacac

SEQ ID NO: 3176 - DNA, 21 bp, Artificial Sequence
  Description of Artificial Sequence: Synthetic oligonucleotide
ggagtccccatgagcctgtcc

SEQ ID NO: 3177 - DNA, 21 bp, Artificial Sequence
  Description of Artificial Sequence: Synthetic oligonucleotide
ccgccacagtgctaggattgg

SEQ ID NO: 3178 - DNA, 23 bp, Artificial Sequence
  Description of Artificial Sequence: Synthetic oligonucleotide
aaaaaaagcaaaagccagtgacc

SEQ ID NO: 3179 - DNA, 29 bp, Artificial Sequence
  Description of Artificial Sequence: Synthetic oligonucleotide
ttctgtcttctcaagcttgatctttactc

SEQ ID NO: 3180 - DNA, 23 bp, Artificial Sequence
  Description of Artificial Sequence: Synthetic oligonucleotide
tgatcattccagcccctctgaac

SEQ ID NO: 3181 - DNA, 24 bp, Artificial Sequence
  Description of Artificial Sequence: Synthetic oligonucleotide
tggagactacaggcaggaaaccac

SEQ ID NO: 3182 - DNA, 27 bp, Artificial Sequence
  Description of Artificial Sequence: Synthetic oligonucleotide
tttgctttttgattcaaaaatttcaca

SEQ ID NO: 3183 - DNA, 24 bp, Artificial Sequence
  Description of Artificial Sequence: Synthetic oligonucleotide
gggagctcttcctctcccaaaacc

SEQ ID NO: 3184 - DNA, 26 bp, Artificial Sequence
  Description of Artificial Sequence: Synthetic oligonucleotide
ggtctctctgcctactcttccttgcc

SEQ ID NO: 3185 - DNA, 20 bp, Artificial Sequence
  Description of Artificial Sequence: Synthetic oligonucleotide
gtggtccatgaccatggcac

SEQ ID NO: 3186 - DNA, 22 bp, Artificial Sequence
  Description of Artificial Sequence: Synthetic oligonucleotide
gtgcaccatcctgatgcctgtc

SEQ ID NO: 3187 - DNA, 22 bp, Artificial Sequence
  Description of Artificial Sequence: Synthetic oligonucleotide
aggcactttccaggttcccacc

SEQ ID NO: 3188 - DNA, 21 bp, Artificial Sequence
  Description of Artificial Sequence: Synthetic oligonucleotide
cctgacttggggatgcctcag

SEQ ID NO: 3189 - DNA, 21 bp, Artificial Sequence
  Description of Artificial Sequence: Synthetic oligonucleotide
acttgcaggtcaggggtcccg

SEQ ID NO: 3190 - DNA, 22 bp, Artificial Sequence
  Description of Artificial Sequence: Synthetic oligonucleotide
cagtgcaggtttgtggtcgctg

SEQ ID NO: 3191 - DNA, 21 bp, Artificial Sequence
  Description of Artificial Sequence: Synthetic oligonucleotide
gagaaacccgagaggccgatg

SEQ ID NO: 3192 - DNA, 21 bp, Artificial Sequence
  Description of Artificial Sequence: Synthetic oligonucleotide
gtttccatgctgggcctgccg

SEQ ID NO: 3193 - DNA, 22 bp, Artificial Sequence
  Description of Artificial Sequence: Synthetic oligonucleotide
aaagccagccagaaccaagcag

SEQ ID NO: 3194 - DNA, 22 bp, Artificial Sequence
  Description of Artificial Sequence: Synthetic oligonucleotide
ctttgtggccatcagcttcctg

SEQ ID NO: 3195 - DNA, 20 bp, Artificial Sequence
  Description of Artificial Sequence: Synthetic oligonucleotide
aggagttgaggccggggagc

SEQ ID NO: 3196 - DNA, 22 bp, Artificial Sequence
  Description of Artificial Sequence: Synthetic oligonucleotide
gggagcacagagcccagacacc

SEQ ID NO: 3197 - DNA, 22 bp, Artificial Sequence
  Description of Artificial Sequence: Synthetic oligonucleotide
aggagagcctcacctgctgtgc

SEQ ID NO: 3198 - DNA, 28 bp, Artificial Sequence
  Description of Artificial Sequence: Synthetic oligonucleotide
cataaatatcatactgcccttttcgatc

SEQ ID NO: 3199 - DNA, 24 bp, Artificial Sequence
  Description of Artificial Sequence: Synthetic oligonucleotide
ggaagccctggtgtgggaaattac

SEQ ID NO: 3200 - DNA, 21 bp, Artificial Sequence
  Description of Artificial Sequence: Synthetic oligonucleotide
ggaccacgcttcatccccttc

SEQ ID NO: 3201 - DNA, 28 bp, Artificial Sequence
  Description of Artificial Sequence: Synthetic oligonucleotide
cacagctaaagccaataaaaataaacag

SEQ ID NO: 3202 - DNA, 30 bp, Artificial Sequence
  Description of Artificial Sequence: Synthetic oligonucleotide
tggagaagacagctattttccataaaagtg

SEQ ID NO: 3203 - DNA, 22 bp, Artificial Sequence
  Description of Artificial Sequence: Synthetic oligonucleotide
cagctccaagggtgtgacaggc

SEQ ID NO: 3204 - DNA, 25 bp, Artificial Sequence
  Description of Artificial Sequence: Synthetic oligonucleotide
ttaagaatatgacttggcgactggc

SEQ ID NO: 3205 - DNA, 27 bp, Artificial Sequence
  Description of Artificial Sequence: Synthetic oligonucleotide
ccagtaagaatgactcagagtctcccc

SEQ ID NO: 3206 - DNA, 20 bp, Artificial Sequence
  Description of Artificial Sequence: Synthetic oligonucleotide
agagagccaagggccccacg

SEQ ID NO: 3207 - DNA, 30 bp, Artificial Sequence
  Description of Artificial Sequence: Synthetic oligonucleotide
tgcttctcacaactgcttaaattaggtatg

SEQ ID NO: 3208 - DNA, 21 bp, Artificial Sequence
  Description of Artificial Sequence: Synthetic oligonucleotide
aactgggactgcagctgggac

SEQ ID NO: 3209 - DNA, 27 bp, Artificial Sequence
  Description of Artificial Sequence: Synthetic oligonucleotide
aaaactgccttataacaccattcaagc

SEQ ID NO: 3210 - DNA, 23 bp, Artificial Sequence
  Description of Artificial Sequence: Synthetic oligonucleotide
accagagggagggcgatattctg

SEQ ID NO: 3211 - DNA, 22 bp, Artificial Sequence
  Description of Artificial Sequence: Synthetic oligonucleotide
gtacacatgccatgtgcagcac

SEQ ID NO: 3212 - DNA, 29 bp, Artificial Sequence
  Description of Artificial Sequence: Synthetic oligonucleotide
ccaaatatactgaaataatgatgtgctgc

SEQ ID NO: 3213 - DNA, 21 bp, Artificial Sequence
  Description of Artificial Sequence: Synthetic oligonucleotide
ctcaggccctcctctcccctc

SEQ ID NO: 3214 - DNA, 20 bp, Artificial Sequence
  Description of Artificial Sequence: Synthetic oligonucleotide
caactgcaggggtgactggg

SEQ ID NO: 3215 - DNA, 22 bp, Artificial Sequence
  Description of Artificial Sequence: Synthetic oligonucleotide
ggaaggatcagcgggagctctg

SEQ ID NO: 3216 - DNA, 22 bp, Artificial Sequence
  Description of Artificial Sequence: Synthetic oligonucleotide
ggaggtgtagggtggtgccacg

SEQ ID NO: 3217 - DNA, 20 bp, Artificial Sequence
  Description of Artificial Sequence: Synthetic oligonucleotide
aggaatggcctgtgggggag

SEQ ID NO: 3218 - DNA, 20 bp, Artificial Sequence
  Description of Artificial Sequence: Synthetic oligonucleotide
gagagggtgcgcaggaagag

SEQ ID NO: 3219 - DNA, 22 bp, Artificial Sequence
  Description of Artificial Sequence: Synthetic oligonucleotide
acgccttagcgcttccagctcc

SEQ ID NO: 3220 - DNA, 24 bp, Artificial Sequence
  Description of Artificial Sequence: Synthetic oligonucleotide
agaatttacgcctggactcctcag

SEQ ID NO: 3221 - DNA, 21 bp, Artificial Sequence
  Description of Artificial Sequence: Synthetic oligonucleotide
cagctctcctagaggggggcg

SEQ ID NO: 3222 - DNA, 24 bp, Artificial Sequence
  Description of Artificial Sequence: Synthetic oligonucleotide
tgacctttttcctgggcaactctg

SEQ ID NO: 3223 - DNA, 21 bp, Artificial Sequence
  Description of Artificial Sequence: Synthetic oligonucleotide
ggacacaggggccttgaaagg

SEQ ID NO: 3224 - DNA, 22 bp, Artificial Sequence
  Description of Artificial Sequence: Synthetic oligonucleotide
ctgacctttggccctgaagggc

SEQ ID NO: 3225 - DNA, 24 bp, Artificial Sequence
  Description of Artificial Sequence: Synthetic oligonucleotide
ccctagtcactgccaagaggagcc

SEQ ID NO: 3226 - DNA, 19 bp, Artificial Sequence
  Description of Artificial Sequence: Synthetic oligonucleotide
ccctccccgcacaggaaat

SEQ ID NO: 3227 - DNA, 21 bp, Artificial Sequence
  Description of Artificial Sequence: Synthetic oligonucleotide
ggcactcagctgatgcccttc

SEQ ID NO: 3228 - DNA, 18 bp, Artificial Sequence
  Description of Artificial Sequence: Synthetic oligonucleotide
cgcgcccagccgtctgtc

SEQ ID NO: 3229 - DNA, 21 bp, Artificial Sequence
  Description of Artificial Sequence: Synthetic oligonucleotide
caccccgggctatttgacagc

SEQ ID NO: 3230 - DNA, 28 bp, Artificial Sequence
  Description of Artificial Sequence: Synthetic oligonucleotide
tctattagctccagaaatacttccacag

SEQ ID NO: 3231 - DNA, 20 bp, Artificial Sequence
  Description of Artificial Sequence: Synthetic oligonucleotide
cctgggtgacaggaggagac

SEQ ID NO: 3232 - DNA, 19 bp, Artificial Sequence
  Description of Artificial Sequence: Synthetic oligonucleotide
aggcccaccaggcatgccc

SEQ ID NO: 3233 - DNA, 20 bp, Artificial Sequence
  Description of Artificial Sequence: Synthetic oligonucleotide
gacagtcctggccctggctt

SEQ ID NO: 3234 - DNA, 22 bp, Artificial Sequence
  Description of Artificial Sequence: Synthetic oligonucleotide
cagccatagggaagaggggaag

SEQ ID NO: 3235 - DNA, 22 bp, Artificial Sequence
  Description of Artificial Sequence: Synthetic oligonucleotide
ccctctctgccttgggaccttg

SEQ ID NO: 3236 - DNA, 20 bp, Artificial Sequence
  Description of Artificial Sequence: Synthetic oligonucleotide
cccagcaaacacacgggttg

SEQ ID NO: 3237 - DNA, 23 bp, Artificial Sequence
  Description of Artificial Sequence: Synthetic oligonucleotide
aatattgcccagtcgcacagctg

SEQ ID NO: 3238 - DNA, 23 bp, Artificial Sequence
  Description of Artificial Sequence: Synthetic oligonucleotide
gcccagaaacctcaggaaggaag

SEQ ID NO: 3239 - DNA, 23 bp, Artificial Sequence
  Description of Artificial Sequence: Synthetic oligonucleotide
ttctccttcagcctcctcccttc

SEQ ID NO: 3240 - DNA, 21 bp, Artificial Sequence
  Description of Artificial Sequence: Synthetic oligonucleotide
ctgggaattctgggcaggcac

SEQ ID NO: 3241 - DNA, 26 bp, Artificial Sequence
  Description of Artificial Sequence: Synthetic oligonucleotide
cgtttcctgccgctataacagaatac

SEQ ID NO: 3242 - DNA, 21 bp, Artificial Sequence
  Description of Artificial Sequence: Synthetic oligonucleotide
ctggcacgttgaggtcccctc

SEQ ID NO: 3243 - DNA, 21 bp, Artificial Sequence
  Description of Artificial Sequence: Synthetic oligonucleotide
gctcctcctcaccagcccacc

SEQ ID NO: 3244 - DNA, 21 bp, Artificial Sequence
  Description of Artificial Sequence: Synthetic oligonucleotide
cacgggaggaaagggggaatg

SEQ ID NO: 3245 - DNA, 26 bp, Artificial Sequence
  Description of Artificial Sequence: Synthetic oligonucleotide
gaaatggggctaatcatttgctttat

SEQ ID NO: 3246 - DNA, 21 bp, Artificial Sequence
  Description of Artificial Sequence: Synthetic oligonucleotide
gagcaatctcagcccccaact

SEQ ID NO: 3247 - DNA, 22 bp, Artificial Sequence
  Description of Artificial Sequence: Synthetic oligonucleotide
gtcccaccccagctttcaggtg

SEQ ID NO: 3248 - DNA, 20 bp, Artificial Sequence
  Description of Artificial Sequence: Synthetic oligonucleotide
gggccccttccacaatcctc

SEQ ID NO: 3249 - DNA, 20 bp, Artificial Sequence
  Description of Artificial Sequence: Synthetic oligonucleotide
ctgcagatcaggggccagac

SEQ ID NO: 3250 - DNA, 23 bp, Artificial Sequence
  Description of Artificial Sequence: Synthetic oligonucleotide
ctgttccgaagcatgttcctccc

SEQ ID NO: 3251 - DNA, 20 bp, Artificial Sequence
  Description of Artificial Sequence: Synthetic oligonucleotide
gggagaggagggcctgaggc

SEQ ID NO: 3252 - DNA, 30 bp, Artificial Sequence
  Description of Artificial Sequence: Synthetic oligonucleotide
caagcatgtttgtacataaagattctcctg

SEQ ID NO: 3253 - DNA, 21 bp, Artificial Sequence
  Description of Artificial Sequence: Synthetic oligonucleotide
agggggcaaggcgtctgtttc

SEQ ID NO: 3254 - DNA, 22 bp, Artificial Sequence
  Description of Artificial Sequence: Synthetic oligonucleotide
cacctcttgaccagctgccttg

SEQ ID NO: 3255 - DNA, 21 bp, Artificial Sequence
  Description of Artificial Sequence: Synthetic oligonucleotide
ggaccaggagctggtgcttcc

SEQ ID NO: 3256 - DNA, 21 bp, Artificial Sequence
  Description of Artificial Sequence: Synthetic oligonucleotide
agccggctggatctcttggag

SEQ ID NO: 3257 - DNA, 28 bp, Artificial Sequence
  Description of Artificial Sequence: Synthetic oligonucleotide
gccacatatggaattacaaatttttctg

SEQ ID NO: 3258 - DNA, 20 bp, Artificial Sequence
  Description of Artificial Sequence: Synthetic oligonucleotide
gcctggtgctgggcctagtg

SEQ ID NO: 3259 - DNA, 19 bp, Artificial Sequence
  Description of Artificial Sequence: Synthetic oligonucleotide
gctgagtgccggctcacct

SEQ ID NO: 3260 - DNA, 26 bp, Artificial Sequence
  Description of Artificial Sequence: Synthetic oligonucleotide
aatttctgtgattggctgaagacagc

SEQ ID NO: 3261 - DNA, 22 bp, Artificial Sequence
  Description of Artificial Sequence: Synthetic oligonucleotide
cctcacctggcagacgaaaggg

SEQ ID NO: 3262 - DNA, 29 bp, Artificial Sequence
  Description of Artificial Sequence: Synthetic oligonucleotide
cccaagtggctaatcagtcctaattatag

SEQ ID NO: 3263 - DNA, 22 bp, Artificial Sequence
  Description of Artificial Sequence: Synthetic oligonucleotide
ctgtcaaggcatcagggaaggc

SEQ ID NO: 3264 - DNA, 24 bp, Artificial Sequence
  Description of Artificial Sequence: Synthetic oligonucleotide
aagatgaaggtctggaccacgacc

SEQ ID NO: 3265 - DNA, 30 bp, Artificial Sequence
  Description of Artificial Sequence: Synthetic oligonucleotide
gaaacacaactgtaaacaagacagatttca

SEQ ID NO: 3266 - DNA, 20 bp, Artificial Sequence
  Description of Artificial Sequence: Synthetic oligonucleotide
ctggtgggcaccatgcattg

SEQ ID NO: 3267 - DNA, 22 bp, Artificial Sequence
  Description of Artificial Sequence: Synthetic oligonucleotide
ctgggctttaagggaccctcac

SEQ ID NO: 3268 - DNA, 29 bp, Artificial Sequence
  Description of Artificial Sequence: Synthetic oligonucleotide
cctagcatttccctatgagctaactatgc

SEQ ID NO: 3269 - DNA, 21 bp, Artificial Sequence
  Description of Artificial Sequence: Synthetic oligonucleotide
actgtcccctgccctctcacg

SEQ ID NO: 3270 - DNA, 23 bp, Artificial Sequence
  Description of Artificial Sequence: Synthetic oligonucleotide
tttgtggtgaaggaggggagagg

SEQ ID NO: 3271 - DNA, 25 bp, Artificial Sequence
  Description of Artificial Sequence: Synthetic oligonucleotide
gggcataagttggatgacctatgac

SEQ ID NO: 3272 - DNA, 19 bp, Artificial Sequence
  Description of Artificial Sequence: Synthetic oligonucleotide
agctggctcccagcctcgc

SEQ ID NO: 3273 - DNA, 20 bp, Artificial Sequence
  Description of Artificial Sequence: Synthetic oligonucleotide
ctgcccctccctcagggagc

SEQ ID NO: 3274 - DNA, 22 bp, Artificial Sequence
  Description of Artificial Sequence: Synthetic oligonucleotide
gacccctgttcccatgctgacc

SEQ ID NO: 3275 - DNA, 22 bp, Artificial Sequence
  Description of Artificial Sequence: Synthetic oligonucleotide
ccacctcctcaaactcacggcg

SEQ ID NO: 3276 - DNA, 28 bp, Artificial Sequence
  Description of Artificial Sequence: Synthetic oligonucleotide
tcctaacctatattattgcaccagtgtg

SEQ ID NO: 3277 - DNA, 22 bp, Artificial Sequence
  Description of Artificial Sequence: Synthetic oligonucleotide
gtgattggattgtggctgcccg

SEQ ID NO: 3278 - DNA, 20 bp, Artificial Sequence
  Description of Artificial Sequence: Synthetic oligonucleotide
ggtcccctcacctcacccac

SEQ ID NO: 3279 - DNA, 25 bp, Artificial Sequence
  Description of Artificial Sequence: Synthetic oligonucleotide
aaataagtcagccactgcacctggg

SEQ ID NO: 3280 - DNA, 27 bp, Artificial Sequence
  Description of Artificial Sequence: Synthetic oligonucleotide
gagcaaagagtcaacaaaaccttctgg

SEQ ID NO: 3281 - DNA, 21 bp, Artificial Sequence
  Description of Artificial Sequence: Synthetic oligonucleotide
cggcctgttggcagaagagtg

SEQ ID NO: 3282 - DNA, 24 bp, Artificial Sequence
  Description of Artificial Sequence: Synthetic oligonucleotide
aatcccgtttccaggctaaattgc

SEQ ID NO: 3283 - DNA, 30 bp, Artificial Sequence
  Description of Artificial Sequence: Synthetic oligonucleotide
ggcggaatagtattccatcatgtatatatg

SEQ ID NO: 3284 - DNA, 19 bp, Artificial Sequence
  Description of Artificial Sequence: Synthetic oligonucleotide
ctatgcctccccctgccac

SEQ ID NO: 3285 - DNA, 21 bp, Artificial Sequence
  Description of Artificial Sequence: Synthetic oligonucleotide
atgccactgccctccagaccg

SEQ ID NO: 3286 - DNA, 22 bp, Artificial Sequence
  Description of Artificial Sequence: Synthetic oligonucleotide
agatgcatcttgcccacagcac

SEQ ID NO: 3287 - DNA, 27 bp, Artificial Sequence
  Description of Artificial Sequence: Synthetic oligonucleotide
ttttcattgcctcaaaatttgattttg

SEQ ID NO: 3288 - DNA, 21 bp, Artificial Sequence
  Description of Artificial Sequence: Synthetic oligonucleotide
gctcccatccccagctcattc

SEQ ID NO: 3289 - DNA, 22 bp, Artificial Sequence
  Description of Artificial Sequence: Synthetic oligonucleotide
cagaaaggccaaggttcccacc

SEQ ID NO: 3290 - DNA, 27 bp, Artificial Sequence
  Description of Artificial Sequence: Synthetic oligonucleotide
ccctgctggtaaatgattcttcattac

SEQ ID NO: 3291 - DNA, 23 bp, Artificial Sequence
  Description of Artificial Sequence: Synthetic oligonucleotide
cactgttccctcctcagggactg

SEQ ID NO: 3292 - DNA, 20 bp, Artificial Sequence
  Description of Artificial Sequence: Synthetic oligonucleotide
acaggccccttctgcggagg

SEQ ID NO: 3293 - DNA, 20 bp, Artificial Sequence
  Description of Artificial Sequence: Synthetic oligonucleotide
aggtggggtggagggggagg

SEQ ID NO: 3294 - DNA, 24 bp, Artificial Sequence
  Description of Artificial Sequence: Synthetic oligonucleotide
atcaaagcagtcatgtgtgcaatc

SEQ ID NO: 3295 - DNA, 20 bp, Artificial Sequence
  Description of Artificial Sequence: Synthetic oligonucleotide
gggacgcagttctcggacgc

SEQ ID NO: 3296 - DNA, 22 bp, Artificial Sequence
  Description of Artificial Sequence: Synthetic oligonucleotide
ggctcctgctttccctgagaag

SEQ ID NO: 3297 - DNA, 19 bp, Artificial Sequence
  Description of Artificial Sequence: Synthetic oligonucleotide
ctcagcctctgaccgcccg

SEQ ID NO: 3298 - DNA, 22 bp, Artificial Sequence
  Description of Artificial Sequence: Synthetic oligonucleotide
gaggaaggaggcagtgagtggc

SEQ ID NO: 3299 - DNA, 22 bp, Artificial Sequence
  Description of Artificial Sequence: Synthetic oligonucleotide
catcactcttgcctgctgccac

SEQ ID NO: 3300 - DNA, 22 bp, Artificial Sequence
  Description of Artificial Sequence: Synthetic oligonucleotide
catcactcttgcctgctgccac

SEQ ID NO: 3301 - DNA, 21 bp, Artificial Sequence
  Description of Artificial Sequence: Synthetic oligonucleotide
cctccaggctggatgcagacg

SEQ ID NO: 3302 - DNA, 24 bp, Artificial Sequence
  Description of Artificial Sequence: Synthetic oligonucleotide
gcttgcttacgatggcaaggattt

SEQ ID NO: 3303 - DNA, 21 bp, Artificial Sequence
  Description of Artificial Sequence: Synthetic oligonucleotide
gctgaaaaggggcgtcgtgtc

SEQ ID NO: 3304 - DNA, 28 bp, Artificial Sequence
  Description of Artificial Sequence: Synthetic oligonucleotide
cattctggagaaaggaaaaaaatgagac

SEQ ID NO: 3305 - DNA, 19 bp, Artificial Sequence
  Description of Artificial Sequence: Synthetic oligonucleotide
ccctttcccatgacccccg

SEQ ID NO: 3306 - DNA, 20 bp, Artificial Sequence
  Description of Artificial Sequence: Synthetic oligonucleotide
ccccacaggcggtgtatggg

SEQ ID NO: 3307 - DNA, 22 bp, Artificial Sequence
  Description of Artificial Sequence: Synthetic oligonucleotide
tcctccagaaggtccaaagccg

SEQ ID NO: 3308 - DNA, 20 bp, Artificial Sequence
  Description of Artificial Sequence: Synthetic oligonucleotide
atggcgcaagcagagacgca

SEQ ID NO: 3309 - DNA, 27 bp, Artificial Sequence
  Description of Artificial Sequence: Synthetic oligonucleotide
accctttttggtcttattttcacttac

SEQ ID NO: 3310 - DNA, 28 bp, Artificial Sequence
  Description of Artificial Sequence: Synthetic oligonucleotide
cccacctatagtactgctgctactcaac

SEQ ID NO: 3311 - DNA, 29 bp, Artificial Sequence
  Description of Artificial Sequence: Synthetic oligonucleotide
caaaccaaaacaagtcaaattaccataac

SEQ ID NO: 3312 - DNA, 29 bp, Artificial Sequence
  Description of Artificial Sequence: Synthetic oligonucleotide
tttcttggatataacaccaaagatacaac

SEQ ID NO: 3313 - DNA, 22 bp, Artificial Sequence
  Description of Artificial Sequence: Synthetic oligonucleotide
agcaggcaagagtgatgggagg

SEQ ID NO: 3314 - DNA, 22 bp, Artificial Sequence
  Description of Artificial Sequence: Synthetic oligonucleotide
agcaggcaagagtgatgggagg

SEQ ID NO: 3315 - DNA, 21 bp, Artificial Sequence
  Description of Artificial Sequence: Synthetic oligonucleotide
agggagcccctaggggagaag

SEQ ID NO: 3316 - DNA, 21 bp, Artificial Sequence
  Description of Artificial Sequence: Synthetic oligonucleotide
aggagtgggagcagggtcatg

SEQ ID NO: 3317 - DNA, 23 bp, Artificial Sequence
  Description of Artificial Sequence: Synthetic oligonucleotide
ctgctgtggatatccccagcacc

SEQ ID NO: 3318 - DNA, 22 bp, Artificial Sequence
  Description of Artificial Sequence: Synthetic oligonucleotide
tggactctttgccccttccagg

SEQ ID NO: 3319 - DNA, 19 bp, Artificial Sequence
  Description of Artificial Sequence: Synthetic oligonucleotide
aggggcccctagagggccg

SEQ ID NO: 3320 - DNA, 29 bp, Artificial Sequence
  Description of Artificial Sequence: Synthetic oligonucleotide
tctctatggaagtcctaagactgaaatcg

SEQ ID NO: 3321 - DNA, 30 bp, Artificial Sequence
  Description of Artificial Sequence: Synthetic oligonucleotide
gggacacaaaaccagttaaagatagaaagg

SEQ ID NO: 3322 - DNA, 22 bp, Artificial Sequence
  Description of Artificial Sequence: Synthetic oligonucleotide
ggaagcgaaaggggagctgagc

SEQ ID NO: 3323 - DNA, 27 bp, Artificial Sequence
  Description of Artificial Sequence: Synthetic oligonucleotide
cggaatacagctcctaggtttttgtgc

SEQ ID NO: 3324 - DNA, 23 bp, Artificial Sequence
  Description of Artificial Sequence: Synthetic oligonucleotide
gtccaggcccccttctagtttcg

SEQ ID NO: 3325 - DNA, 22 bp, Artificial Sequence
  Description of Artificial Sequence: Synthetic oligonucleotide
tgtgtttgctgtgccagccttg

SEQ ID NO: 3326 - DNA, 29 bp, Artificial Sequence
  Description of Artificial Sequence: Synthetic oligonucleotide
ttgtgttttctattcatattgctattccg

SEQ ID NO: 3327 - DNA, 20 bp, Artificial Sequence
  Description of Artificial Sequence: Synthetic oligonucleotide
ggacggagggaagaccctgg

SEQ ID NO: 3328 - DNA, 22 bp, Artificial Sequence
  Description of Artificial Sequence: Synthetic oligonucleotide
ggactcacctctgcagccacag

SEQ ID NO: 3329 - DNA, 29 bp, Artificial Sequence
  Description of Artificial Sequence: Synthetic oligonucleotide
tgttgctgctagttattatgaggtagttc

SEQ ID NO: 3330 - DNA, 21 bp, Artificial Sequence
  Description of Artificial Sequence: Synthetic oligonucleotide
ctgctggggtcagtggctctg

SEQ ID NO: 3331 - DNA, 30 bp, Artificial Sequence
  Description of Artificial Sequence: Synthetic oligonucleotide
cctctaacactctccaagtaaaatcacatg

SEQ ID NO: 3332 - DNA, 27 bp, Artificial Sequence
  Description of Artificial Sequence: Synthetic oligonucleotide
gtttcctgaaagtgtaactgctgatcc

SEQ ID NO: 3333 - DNA, 22 bp, Artificial Sequence
  Description of Artificial Sequence: Synthetic oligonucleotide
acagaggctcacacatcgccct

SEQ ID NO: 3334 - DNA, 19 bp, Artificial Sequence
  Description of Artificial Sequence: Synthetic oligonucleotide
agggggctgtctggcaggc

SEQ ID NO: 3335 - DNA, 22 bp, Artificial Sequence
  Description of Artificial Sequence: Synthetic oligonucleotide
tgctgctctctgggcctctttc

SEQ ID NO: 3336 - DNA, 19 bp, Artificial Sequence
  Description of Artificial Sequence: Synthetic oligonucleotide
gagacacggagcccagccc

SEQ ID NO: 3337 - DNA, 18 bp, Artificial Sequence
  Description of Artificial Sequence: Synthetic oligonucleotide
gggcaccaagggcccccc

SEQ ID NO: 3338 - DNA, 27 bp, Artificial Sequence
  Description of Artificial Sequence: Synthetic oligonucleotide
ttgtgtgactgccttaaaactaatggc

SEQ ID NO: 3339 - DNA, 21 bp, Artificial Sequence
  Description of Artificial Sequence: Synthetic oligonucleotide
ctagccgggctggagttgagg

SEQ ID NO: 3340 - DNA, 21 bp, Artificial Sequence
  Description of Artificial Sequence: Synthetic oligonucleotide
ctgcccctggaaaaggtcccg

SEQ ID NO: 3341 - DNA, 19 bp, Artificial Sequence
  Description of Artificial Sequence: Synthetic oligonucleotide
ggagctttcagtgcggggg

SEQ ID NO: 3342 - DNA, 18 bp, Artificial Sequence
  Description of Artificial Sequence: Synthetic oligonucleotide
gcttgagccacctcgccc

SEQ ID NO: 3343 - DNA, 21 bp, Artificial Sequence
  Description of Artificial Sequence: Synthetic oligonucleotide
gttggcgacatgatgcatgcg

SEQ ID NO: 3344 - DNA, 20 bp, Artificial Sequence
  Description of Artificial Sequence: Synthetic oligonucleotide
agctcagcccagcccctcac

SEQ ID NO: 3345 - DNA, 29 bp, Artificial Sequence
  Description of Artificial Sequence: Synthetic oligonucleotide
catagatgtccaatgataggagactgatc

SEQ ID NO: 3346 - DNA, 21 bp, Artificial Sequence
  Description of Artificial Sequence: Synthetic oligonucleotide
gcgatccacgtgcaaaactcc

SEQ ID NO: 3347 - DNA, 18 bp, Artificial Sequence
  Description of Artificial Sequence: Synthetic oligonucleotide
cccccgtgcccggctttc

SEQ ID NO: 3348 - DNA, 23 bp, Artificial Sequence
  Description of Artificial Sequence: Synthetic oligonucleotide
ccagtatccacctctgggggaga

SEQ ID NO: 3349 - DNA, 28 bp, Artificial Sequence
  Description of Artificial Sequence: Synthetic oligonucleotide
ccacactgtcaatgaaaagagtcaaacg

SEQ ID NO: 3350 - DNA, 23 bp, Artificial Sequence
  Description of Artificial Sequence: Synthetic oligonucleotide
cagggcagatgttccctcacagg

SEQ ID NO: 3351 - DNA, 28 bp, Artificial Sequence
  Description of Artificial Sequence: Synthetic oligonucleotide
cagccataatcacgagagatgtaagaac

SEQ ID NO: 3352 - DNA, 18 bp, Artificial Sequence
  Description of Artificial Sequence: Synthetic oligonucleotide
atcgagccccagggggag

SEQ ID NO: 3353 - DNA, 20 bp, Artificial Sequence
  Description of Artificial Sequence: Synthetic oligonucleotide
atctccacctgggggggcgg

SEQ ID NO: 3354 - DNA, 22 bp, Artificial Sequence
  Description of Artificial Sequence: Synthetic oligonucleotide
gtgcccagtgtgtaacaggccc

SEQ ID NO: 3355 - DNA, 21 bp, Artificial Sequence
  Description of Artificial Sequence: Synthetic oligonucleotide
accacgccttctgctccaccc

SEQ ID NO: 3356 - DNA, 28 bp, Artificial Sequence
  Description of Artificial Sequence: Synthetic oligonucleotide
tgaatagctctgtaaggcactaaaacac

SEQ ID NO: 3357 - DNA, 30 bp, Artificial Sequence
  Description of Artificial Sequence: Synthetic oligonucleotide
ggactaaaaaggaaagaagctaacaatggc

SEQ ID NO: 3358 - DNA, 28 bp, Artificial Sequence
  Description of Artificial Sequence: Synthetic oligonucleotide
ggctgcatgattttaaattaaatgattc

SEQ ID NO: 3359 - DNA, 22 bp, Artificial Sequence
  Description of Artificial Sequence: Synthetic oligonucleotide
agaggctctgagaggtggcctg

SEQ ID NO: 3360 - DNA, 18 bp, Artificial Sequence
  Description of Artificial Sequence: Synthetic oligonucleotide
cacccctttcctggccag

SEQ ID NO: 3361 - DNA, 24 bp, Artificial Sequence
  Description of Artificial Sequence: Synthetic oligonucleotide
aaagtcctgctgctccataaagac

SEQ ID NO: 3362 - DNA, 20 bp, Artificial Sequence
  Description of Artificial Sequence: Synthetic oligonucleotide
gggctgaccgggtcatgagc

SEQ ID NO: 3363 - DNA, 25 bp, Artificial Sequence
  Description of Artificial Sequence: Synthetic oligonucleotide
gcctttcgaattaacccagtcagac

SEQ ID NO: 3364 - DNA, 29 bp, Artificial Sequence
  Description of Artificial Sequence: Synthetic oligonucleotide
cctttacgataggtcttgaagttaggtac

SEQ ID NO: 3365 - DNA, 20 bp, Artificial Sequence
  Description of Artificial Sequence: Synthetic oligonucleotide
agctgggagcccctgagggg

SEQ ID NO: 3366 - DNA, 25 bp, Artificial Sequence
  Description of Artificial Sequence: Synthetic oligonucleotide
gggctatgggatgggatagatagac

SEQ ID NO: 3367 - DNA, 29 bp, Artificial Sequence
  Description of Artificial Sequence: Synthetic oligonucleotide
acacaggtatcttctacaaattgtaagcc

SEQ ID NO: 3368 - DNA, 23 bp, Artificial Sequence
  Description of Artificial Sequence: Synthetic oligonucleotide
cggtggctcaaacctataaccca

SEQ ID NO: 3369 - DNA, 19 bp, Artificial Sequence
  Description of Artificial Sequence: Synthetic oligonucleotide
atccgcggggagacaggcg

SEQ ID NO: 3370 - DNA, 21 bp, Artificial Sequence
  Description of Artificial Sequence: Synthetic oligonucleotide
ccaaggcctgcgttcagttgg

SEQ ID NO: 3371 - DNA, 22 bp, Artificial Sequence
  Description of Artificial Sequence: Synthetic oligonucleotide
atggtcttgagctccaggggac

SEQ ID NO: 3372 - DNA, 28 bp, Artificial Sequence
  Description of Artificial Sequence: Synthetic oligonucleotide
ggcctcacaacctttttttttaagttcc

SEQ ID NO: 3373 - DNA, 29 bp, Artificial Sequence
  Description of Artificial Sequence: Synthetic oligonucleotide
tcaatctactacctctttcgcataatcac

SEQ ID NO: 3374 - DNA, 19 bp, Artificial Sequence
  Description of Artificial Sequence: Synthetic oligonucleotide
gagggtgaccaccctgggc

SEQ ID NO: 3375 - DNA, 20 bp, Artificial Sequence
  Description of Artificial Sequence: Synthetic oligonucleotide
ctgtgccctctggtgagcct

SEQ ID NO: 3376 - DNA, 20 bp, Artificial Sequence
  Description of Artificial Sequence: Synthetic oligonucleotide
aaagggagcctggggctgtg

SEQ ID NO: 3377 - DNA, 22 bp, Artificial Sequence
  Description of Artificial Sequence: Synthetic oligonucleotide
gagaattgcaaggtggctgccc

SEQ ID NO: 3378 - DNA, 20 bp, Artificial Sequence
  Description of Artificial Sequence: Synthetic oligonucleotide
ggaacgtgggaaggaacccg

SEQ ID NO: 3379 - DNA, 22 bp, Artificial Sequence
  Description of Artificial Sequence: Synthetic oligonucleotide
tgggcaacagagacagactccg

SEQ ID NO: 3380 - DNA, 27 bp, Artificial Sequence
  Description of Artificial Sequence: Synthetic oligonucleotide
ctggttagaaggttggtttgaaaaatg

SEQ ID NO: 3381 - DNA, 29 bp, Artificial Sequence
  Description of Artificial Sequence: Synthetic oligonucleotide
gaatgaactaattcagaaaatcggtaccg

SEQ ID NO: 3382 - DNA, 20 bp, Artificial Sequence
  Description of Artificial Sequence: Synthetic oligonucleotide
aagtcccagggcctcaggcc

SEQ ID NO: 3383 - DNA, 19 bp, Artificial Sequence
  Description of Artificial Sequence: Synthetic oligonucleotide
acctgcggatcgcgctccg

SEQ ID NO: 3384 - DNA, 18 bp, Artificial Sequence
  Description of Artificial Sequence: Synthetic oligonucleotide
cccgatcaatcccccggg

SEQ ID NO: 3385 - DNA, 28 bp, Artificial Sequence
  Description of Artificial Sequence: Synthetic oligonucleotide
aaagtgaacaggttgaatttaatctctc

SEQ ID NO: 3386 - DNA, 26 bp, Artificial Sequence
  Description of Artificial Sequence: Synthetic oligonucleotide
cccacctttacagtatttcacagggg

SEQ ID NO: 3387 - DNA, 20 bp, Artificial Sequence
  Description of Artificial Sequence: Synthetic oligonucleotide
aggcggagagagagccggtc

SEQ ID NO: 3388 - DNA, 20 bp, Artificial Sequence
  Description of Artificial Sequence: Synthetic oligonucleotide
ggtcaaatgccatcacggcc

SEQ ID NO: 3389 - DNA, 21 bp, Artificial Sequence
  Description of Artificial Sequence: Synthetic oligonucleotide
ggggacaggaattcaggggac

SEQ ID NO: 3390 - DNA, 20 bp, Artificial Sequence
  Description of Artificial Sequence: Synthetic oligonucleotide
ggacctcattggggttgggc

SEQ ID NO: 3391 - DNA, 18 bp, Artificial Sequence
  Description of Artificial Sequence: Synthetic oligonucleotide
ggtccaatgcacgggcac

SEQ ID NO: 3392 - DNA, 21 bp, Artificial Sequence
  Description of Artificial Sequence: Synthetic oligonucleotide
gggtgatgcggatgctctttc

SEQ ID NO: 3393 - DNA, 22 bp, Artificial Sequence
  Description of Artificial Sequence: Synthetic oligonucleotide
gtggcactggatctgggggtac

SEQ ID NO: 3394 - DNA, 22 bp, Artificial Sequence
  Description of Artificial Sequence: Synthetic oligonucleotide
ctaccttccccgatgcccatcc

SEQ ID NO: 3395 - DNA, 18 bp, Artificial Sequence
  Description of Artificial Sequence: Synthetic oligonucleotide
cctcagccctgccctgcc

SEQ ID NO: 3396 - DNA, 21 bp, Artificial Sequence
  Description of Artificial Sequence: Synthetic oligonucleotide
caaccaccgcacatccactgc

SEQ ID NO: 3397 - DNA, 20 bp, Artificial Sequence
  Description of Artificial Sequence: Synthetic oligonucleotide
ctgtgactggccagggaccc

SEQ ID NO: 3398 - DNA, 18 bp, Artificial Sequence
  Description of Artificial Sequence: Synthetic oligonucleotide
accgccagtgccttgggg

SEQ ID NO: 3399 - DNA, 19 bp, Artificial Sequence
  Description of Artificial Sequence: Synthetic oligonucleotide
ggaggggtggaggggaccg

SEQ ID NO: 3400 - DNA, 23 bp, Artificial Sequence
  Description of Artificial Sequence: Synthetic oligonucleotide
cccacctgtcctgcagtctttga

SEQ ID NO: 3401 - DNA, 30 bp, Artificial Sequence
  Description of Artificial Sequence: Synthetic oligonucleotide
gagttgtatatatgggaaacttacaaggag

SEQ ID NO: 3402 - DNA, 26 bp, Artificial Sequence
  Description of Artificial Sequence: Synthetic oligonucleotide
tggtgtaagggaaaggagagaaactg

SEQ ID NO: 3403 - DNA, 28 bp, Artificial Sequence
  Description of Artificial Sequence: Synthetic oligonucleotide
tttttctgtggttctgacctaacatttc

SEQ ID NO: 3404 - DNA, 21 bp, Artificial Sequence
  Description of Artificial Sequence: Synthetic oligonucleotide
cttgtgccaatggggatgccc

SEQ ID NO: 3405 - DNA, 26 bp, Artificial Sequence
  Description of Artificial Sequence: Synthetic oligonucleotide
tggagctgttcttagagatgacattg

SEQ ID NO: 3406 - DNA, 21 bp, Artificial Sequence
  Description of Artificial Sequence: Synthetic oligonucleotide
cggatctggtcggtgatggtg

SEQ ID NO: 3407 - DNA, 20 bp, Artificial Sequence
  Description of Artificial Sequence: Synthetic oligonucleotide
agtccatcagccgctgctgc

SEQ ID NO: 3408 - DNA, 22 bp, Artificial Sequence
  Description of Artificial Sequence: Synthetic oligonucleotide
ctgctccctgctgcaaaaaacg

SEQ ID NO: 3409 - DNA, 30 bp, Artificial Sequence
  Description of Artificial Sequence: Synthetic oligonucleotide
tggcatagtagaaaagaaacaagaatgatg

SEQ ID NO: 3410 - DNA, 20 bp, Artificial Sequence
  Description of Artificial Sequence: Synthetic oligonucleotide
cattcacacccacccaccac

SEQ ID NO: 3411 - DNA, 27 bp, Artificial Sequence
  Description of Artificial Sequence: Synthetic oligonucleotide
aatgtggttaacacattagtggactcc

SEQ ID NO: 3412 - DNA, 20 bp, Artificial Sequence
  Description of Artificial Sequence: Synthetic oligonucleotide
gctcaccaccaagtcgccag

SEQ ID NO: 3413 - DNA, 20 bp, Artificial Sequence
  Description of Artificial Sequence: Synthetic oligonucleotide
gcttctgcccactgtccccg

SEQ ID NO: 3414 - DNA, 20 bp, Artificial Sequence
  Description of Artificial Sequence: Synthetic oligonucleotide
ggggagcatcatggcacacg

SEQ ID NO: 3415 - DNA, 21 bp, Artificial Sequence
  Description of Artificial Sequence: Synthetic oligonucleotide
atctgggccagcccaacaccc

SEQ ID NO: 3416 - DNA, 27 bp, Artificial Sequence
  Description of Artificial Sequence: Synthetic oligonucleotide
tgaatgggctcatataagtttccttag

SEQ ID NO: 3417 - DNA, 29 bp, Artificial Sequence
  Description of Artificial Sequence: Synthetic oligonucleotide
caatacacaaacctttacagtattcagac

SEQ ID NO: 3418 - DNA, 20 bp, Artificial Sequence
  Description of Artificial Sequence: Synthetic oligonucleotide
ctcatgggggcaggtgcagc

SEQ ID NO: 3419 - DNA, 19 bp, Artificial Sequence
  Description of Artificial Sequence: Synthetic oligonucleotide
agaaggctgtggggggccg

SEQ ID NO: 3420 - DNA, 30 bp, Artificial Sequence
  Description of Artificial Sequence: Synthetic oligonucleotide
caatggtaccttccatatagcatatagttc

SEQ ID NO: 3421 - DNA, 18 bp, Artificial Sequence
  Description of Artificial Sequence: Synthetic oligonucleotide
gggggaaggtgcaggccg

SEQ ID NO: 3422 - DNA, 22 bp, Artificial Sequence
  Description of Artificial Sequence: Synthetic oligonucleotide
ctgctgcaactcaaggctcacg

SEQ ID NO: 3423 - DNA, 30 bp, Artificial Sequence
  Description of Artificial Sequence: Synthetic oligonucleotide
catgtaaaatttatctttaattcccaatgc

SEQ ID NO: 3424 - DNA, 20 bp, Artificial Sequence
  Description of Artificial Sequence: Synthetic oligonucleotide
tgggcttgagtgggcagctc

SEQ ID NO: 3425 - DNA, 27 bp, Artificial Sequence
  Description of Artificial Sequence: Synthetic oligonucleotide
ctgttaaagcaactgactgctaaagac

SEQ ID NO: 3426 - DNA, 19 bp, Artificial Sequence
  Description of Artificial Sequence: Synthetic oligonucleotide
acccccacccagacccaac

SEQ ID NO: 3427 - DNA, 28 bp, Artificial Sequence
  Description of Artificial Sequence: Synthetic oligonucleotide
gcatttcagtggtattttccatttttgc

SEQ ID NO: 3428 - DNA, 26 bp, Artificial Sequence
  Description of Artificial Sequence: Synthetic oligonucleotide
aggaaagggagagagaggaaagaaag

SEQ ID NO: 3429 - DNA, 21 bp, Artificial Sequence
  Description of Artificial Sequence: Synthetic oligonucleotide
ctcttcccccaccccactgat

SEQ ID NO: 3430 - DNA, 21 bp, Artificial Sequence
  Description of Artificial Sequence: Synthetic oligonucleotide
acctgccaagtgaatggccgg

SEQ ID NO: 3431 - DNA, 22 bp, Artificial Sequence
  Description of Artificial Sequence: Synthetic oligonucleotide
cacccaaggggaaatggagacg

SEQ ID NO: 3432 - DNA, 18 bp, Artificial Sequence
  Description of Artificial Sequence: Synthetic oligonucleotide
gaagggccaacccccccg

SEQ ID NO: 3433 - DNA, 30 bp, Artificial Sequence
  Description of Artificial Sequence: Synthetic oligonucleotide
caaatcaatggattaaataacctagttgag

SEQ ID NO: 3434 - DNA, 19 bp, Artificial Sequence
  Description of Artificial Sequence: Synthetic oligonucleotide
agggccccagtgccatctg

SEQ ID NO: 3435 - DNA, 18 bp, Artificial Sequence
  Description of Artificial Sequence: Synthetic oligonucleotide
gttccggatctgggcgcc

SEQ ID NO: 3436 - DNA, 21 bp, Artificial Sequence
  Description of Artificial Sequence: Synthetic oligonucleotide
ccttcatgatgcaggcccaat

SEQ ID NO: 3437 - DNA, 28 bp, Artificial Sequence
  Description of Artificial Sequence: Synthetic oligonucleotide
tgcaacactctctcactttaccttgttc

SEQ ID NO: 3438 - DNA, 23 bp, Artificial Sequence
  Description of Artificial Sequence: Synthetic oligonucleotide
gtgagaccccattcctacaaaac

SEQ ID NO: 3439 - DNA, 18 bp, Artificial Sequence
  Description of Artificial Sequence: Synthetic oligonucleotide
cgctgcaaggtcgtgcgc

SEQ ID NO: 3440 - DNA, 28 bp, Artificial Sequence
  Description of Artificial Sequence: Synthetic oligonucleotide
tttcatcacacaggtactaagcattctg

SEQ ID NO: 3441 - DNA, 19 bp, Artificial Sequence
  Description of Artificial Sequence: Synthetic oligonucleotide
ggagccagggctcagccag

SEQ ID NO: 3442 - DNA, 24 bp, Artificial Sequence
  Description of Artificial Sequence: Synthetic oligonucleotide
ggaattcccggatgaaaagtgaag

SEQ ID NO: 3443 - DNA, 21 bp, Artificial Sequence
  Description of Artificial Sequence: Synthetic oligonucleotide
gtctacaccagccatgtggag

SEQ ID NO: 3444 - DNA, 20 bp, Artificial Sequence
  Description of Artificial Sequence: Synthetic oligonucleotide
gcttctgcccactgtccccg

SEQ ID NO: 3445 - DNA, 20 bp, Artificial Sequence
  Description of Artificial Sequence: Synthetic oligonucleotide
gaggcatggcactgccatgc

SEQ ID NO: 3446 - DNA, 28 bp, Artificial Sequence
  Description of Artificial Sequence: Synthetic oligonucleotide
tttagcatctaacaatgttcgacatatt

SEQ ID NO: 3447 - DNA, 20 bp, Artificial Sequence
  Description of Artificial Sequence: Synthetic oligonucleotide
ccaactcaccccacctggac

SEQ ID NO: 3448 - DNA, 21 bp, Artificial Sequence
  Description of Artificial Sequence: Synthetic oligonucleotide
aggaggtgcctttggggcagg

SEQ ID NO: 3449 - DNA, 19 bp, Artificial Sequence
  Description of Artificial Sequence: Synthetic oligonucleotide
agaggccccctgtgtcccc

SEQ ID NO: 3450 - DNA, 18 bp, Artificial Sequence
  Description of Artificial Sequence: Synthetic oligonucleotide
gcgcctgcgctgtgtgtg

SEQ ID NO: 3451 - DNA, 27 bp, Artificial Sequence
  Description of Artificial Sequence: Synthetic oligonucleotide
aagagttctgatgagtgcaatttcagg

SEQ ID NO: 3452 - DNA, 18 bp, Artificial Sequence
  Description of Artificial Sequence: Synthetic oligonucleotide
agggacggggcccaagcc

SEQ ID NO: 3453 - DNA, 29 bp, Artificial Sequence
  Description of Artificial Sequence: Synthetic oligonucleotide
tcagctgtcacataataagctaaggaagg

SEQ ID NO: 3454 - DNA, 22 bp, Artificial Sequence
  Description of Artificial Sequence: Synthetic oligonucleotide
gagtgagccatgtggatccctg

SEQ ID NO: 3455 - DNA, 22 bp, Artificial Sequence
  Description of Artificial Sequence: Synthetic oligonucleotide
tttgccactgtttgctgtgggc

SEQ ID NO: 3456 - DNA, 19 bp, Artificial Sequence
  Description of Artificial Sequence: Synthetic oligonucleotide
agggcaggcagggccctgg

SEQ ID NO: 3457 - DNA, 19 bp, Artificial Sequence
  Description of Artificial Sequence: Synthetic oligonucleotide
gcccccttccatccccagg

SEQ ID NO: 3458 - DNA, 25 bp, Artificial Sequence
  Description of Artificial Sequence: Synthetic oligonucleotide
ggtagagggaatgggagagaccagg

SEQ ID NO: 3459 - DNA, 19 bp, Artificial Sequence
  Description of Artificial Sequence: Synthetic oligonucleotide
ggagcgccggtggagtaac

SEQ ID NO: 3460 - DNA, 21 bp, Artificial Sequence
  Description of Artificial Sequence: Synthetic oligonucleotide
agggagggtcagtggggttgg

SEQ ID NO: 3461 - DNA, 18 bp, Artificial Sequence
  Description of Artificial Sequence: Synthetic oligonucleotide
aggatccccggcacccac

SEQ ID NO: 3462 - DNA, 20 bp, Artificial Sequence
  Description of Artificial Sequence: Synthetic oligonucleotide
ggaggagctcacccaccccc

SEQ ID NO: 3463 - DNA, 22 bp, Artificial Sequence
  Description of Artificial Sequence: Synthetic oligonucleotide
tcgcttacataacccagggcgg

SEQ ID NO: 3464 - DNA, 18 bp, Artificial Sequence
  Description of Artificial Sequence: Synthetic oligonucleotide
aggggcctggggcaacgg

SEQ ID NO: 3465 - DNA, 26 bp, Artificial Sequence
  Description of Artificial Sequence: Synthetic oligonucleotide
caacaaacatcatctaccgcagtttc

SEQ ID NO: 3466 - DNA, 21 bp, Artificial Sequence
  Description of Artificial Sequence: Synthetic oligonucleotide
gccctgaccgatacttgggcg

SEQ ID NO: 3467 - DNA, 28 bp, Artificial Sequence
  Description of Artificial Sequence: Synthetic oligonucleotide
tgggctttttgtttttttaattcattcg

SEQ ID NO: 3468 - DNA, 29 bp, Artificial Sequence
  Description of Artificial Sequence: Synthetic oligonucleotide
tgaaggtggaaaacatttaagaagtacac

SEQ ID NO: 3469 - DNA, 19 bp, Artificial Sequence
  Description of Artificial Sequence: Synthetic oligonucleotide
accctgggctgctgcccac

SEQ ID NO: 3470 - DNA, 18 bp, Artificial Sequence
  Description of Artificial Sequence: Synthetic oligonucleotide
ccacaggccccctcaggg

SEQ ID NO: 3471 - DNA, 26 bp, Artificial Sequence
  Description of Artificial Sequence: Synthetic oligonucleotide
cccagagtcacaaactgttatgtcag

SEQ ID NO: 3472 - DNA, 19 bp, Artificial Sequence
  Description of Artificial Sequence: Synthetic oligonucleotide
agggcggggccacgttcag

SEQ ID NO: 3473 - DNA, 30 bp, Artificial Sequence
  Description of Artificial Sequence: Synthetic oligonucleotide
tgaaaaatacaaacttcagagtgaaagaag

SEQ ID NO: 3474 - DNA, 20 bp, Artificial Sequence
  Description of Artificial Sequence: Synthetic oligonucleotide
cacctctccccaccaggtgt

SEQ ID NO: 3475 - DNA, 28 bp, Artificial Sequence
  Description of Artificial Sequence: Synthetic oligonucleotide
tctgattagcagcagttataagtagggg

SEQ ID NO: 3476 - DNA, 20 bp, Artificial Sequence
  Description of Artificial Sequence: Synthetic oligonucleotide
gcaggctctgggtcatgatg

SEQ ID NO: 3477 - DNA, 30 bp, Artificial Sequence
  Description of Artificial Sequence: Synthetic oligonucleotide
gctgaaaattttttggaatatcagttgatg

SEQ ID NO: 3478 - DNA, 25 bp, Artificial Sequence
  Description of Artificial Sequence: Synthetic oligonucleotide
cagaggaaagaattccaaagcagcg

SEQ ID NO: 3479 - DNA, 19 bp, Artificial Sequence
  Description of Artificial Sequence: Synthetic oligonucleotide
accccacccgacccccaac

SEQ ID NO: 3480 - DNA, 20 bp, Artificial Sequence
  Description of Artificial Sequence: Synthetic oligonucleotide
ggaaagtccgggtggcctcg

SEQ ID NO: 3481 - DNA, 19 bp, Artificial Sequence
  Description of Artificial Sequence: Synthetic oligonucleotide
gacgtggtggcatgcaccc

SEQ ID NO: 3482 - DNA, 20 bp, Artificial Sequence
  Description of Artificial Sequence: Synthetic oligonucleotide
gtcagggacagggtcggggg

SEQ ID NO: 3483 - DNA, 22 bp, Artificial Sequence
  Description of Artificial Sequence: Synthetic oligonucleotide
gtgaggagtgggcagcaaggag

SEQ ID NO: 3484 - DNA, 20 bp, Artificial Sequence
  Description of Artificial Sequence: Synthetic oligonucleotide
gcctgcgagagaagcaggcg

SEQ ID NO: 3485 - DNA, 20 bp, Artificial Sequence
  Description of Artificial Sequence: Synthetic oligonucleotide
agccccttctccaagccccg

SEQ ID NO: 3486 - DNA, 19 bp, Artificial Sequence
  Description of Artificial Sequence: Synthetic oligonucleotide
caccccaccccacctctcc

SEQ ID NO: 3487 - DNA, 30 bp, Artificial Sequence
  Description of Artificial Sequence: Synthetic oligonucleotide
tgttaaatagagtggacaaaacacaatgac

SEQ ID NO: 3488 - DNA, 27 bp, Artificial Sequence
  Description of Artificial Sequence: Synthetic oligonucleotide
tctgctgtgcaagataatttcatcttg

SEQ ID NO: 3489 - DNA, 18 bp, Artificial Sequence
  Description of Artificial Sequence: Synthetic oligonucleotide
ccccagggctccaggcgg

SEQ ID NO: 3490 - DNA, 19 bp, Artificial Sequence
  Description of Artificial Sequence: Synthetic oligonucleotide
actgcccccctcccatccc

SEQ ID NO: 3491 - DNA, 18 bp, Artificial Sequence
  Description of Artificial Sequence: Synthetic oligonucleotide
gctggggattggcagccg

SEQ ID NO: 3492 - DNA, 18 bp, Artificial Sequence
  Description of Artificial Sequence: Synthetic oligonucleotide
ccgcccacgtggactggc

SEQ ID NO: 3493 - DNA, 29 bp, Artificial Sequence
  Description of Artificial Sequence: Synthetic oligonucleotide
aaaggtacaaaaagtcacaaattgaaacc

SEQ ID NO: 3494 - DNA, 20 bp, Artificial Sequence
  Description of Artificial Sequence: Synthetic oligonucleotide
accatgccgtccccagaggc

SEQ ID NO: 3495 - DNA, 29 bp, Artificial Sequence
  Description of Artificial Sequence: Synthetic oligonucleotide
ttcatgcattttacatctagatcttcacg

SEQ ID NO: 3496 - DNA, 20 bp, Artificial Sequence
  Description of Artificial Sequence: Synthetic oligonucleotide
ggcccatcgtctcgcactcc

SEQ ID NO: 3497 - DNA, 23 bp, Artificial Sequence
  Description of Artificial Sequence: Synthetic oligonucleotide
ccctaggccccttgtcatcttcg

SEQ ID NO: 3498 - DNA, 28 bp, Artificial Sequence
  Description of Artificial Sequence: Synthetic oligonucleotide
ttgctgttctcatgatagtgaattttcg

SEQ ID NO: 3499 - DNA, 28 bp, Artificial Sequence
  Description of Artificial Sequence: Synthetic oligonucleotide
tgtatcccttccttctctcctagtaccc

SEQ ID NO: 3500 - DNA, 29 bp, Artificial Sequence
  Description of Artificial Sequence: Synthetic oligonucleotide
tcttccttccctattaaaattagaacctg

SEQ ID NO: 3501 - DNA, 24 bp, Artificial Sequence
  Description of Artificial Sequence: Synthetic oligonucleotide
gtcttcaatgatttcacctgggcc

SEQ ID NO: 3502 - DNA, 19 bp, Artificial Sequence
  Description of Artificial Sequence: Synthetic oligonucleotide
ctggagcccccagagcctg

SEQ ID NO: 3503 - DNA, 21 bp, Artificial Sequence
  Description of Artificial Sequence: Synthetic oligonucleotide
ggaagggaaggctgggctgag

SEQ ID NO: 3504 - DNA, 20 bp, Artificial Sequence
  Description of Artificial Sequence: Synthetic oligonucleotide
acaaggggtgggtgcctggg

SEQ ID NO: 3505 - DNA, 19 bp, Artificial Sequence
  Description of Artificial Sequence: Synthetic oligonucleotide
ggccacaccaacttccccc

SEQ ID NO: 3506 - DNA, 18 bp, Artificial Sequence
  Description of Artificial Sequence: Synthetic oligonucleotide
ggctagggccgtgctggg

SEQ ID NO: 3507 - DNA, 28 bp, Artificial Sequence
  Description of Artificial Sequence: Synthetic oligonucleotide
tccagaaaaaaaattattgaaaagagcc

SEQ ID NO: 3508 - DNA, 19 bp, Artificial Sequence
  Description of Artificial Sequence: Synthetic oligonucleotide
atgggccacctgggtgccc

SEQ ID NO: 3509 - DNA, 28 bp, Artificial Sequence
  Description of Artificial Sequence: Synthetic oligonucleotide
tgcaggttataaccagcatttttaaaac

SEQ ID NO: 3510 - DNA, 24 bp, Artificial Sequence
  Description of Artificial Sequence: Synthetic oligonucleotide
cacttgttttccgtcgacgtgatc

SEQ ID NO: 3511 - DNA, 18 bp, Artificial Sequence
  Description of Artificial Sequence: Synthetic oligonucleotide
ccgcctgggagcagctgg

SEQ ID NO: 3512 - DNA, 24 bp, Artificial Sequence
  Description of Artificial Sequence: Synthetic oligonucleotide
gcagcagctcaaaacaaacaacac

SEQ ID NO: 3513 - DNA, 20 bp, Artificial Sequence
  Description of Artificial Sequence: Synthetic oligonucleotide
acctggcggccagaaaaggg

SEQ ID NO: 3514 - DNA, 18 bp, Artificial Sequence
  Description of Artificial Sequence: Synthetic oligonucleotide
ccacgcccggcctcttcc

SEQ ID NO: 3515 - DNA, 18 bp, Artificial Sequence
  Description of Artificial Sequence: Synthetic oligonucleotide
gacccatggcctgccccg

SEQ ID NO: 3516 - DNA, 20 bp, Artificial Sequence
  Description of Artificial Sequence: Synthetic oligonucleotide
ggcgtctgcctgagtttggc

SEQ ID NO: 3517 - DNA, 19 bp, Artificial Sequence
  Description of Artificial Sequence: Synthetic oligonucleotide
gccgcaggaagcttcaggc

SEQ ID NO: 3518 - DNA, 30 bp, Artificial Sequence
  Description of Artificial Sequence: Synthetic oligonucleotide
tgaaaagtagatagttgagtaaagctcatc

SEQ ID NO: 3519 - DNA, 25 bp, Artificial Sequence
  Description of Artificial Sequence: Synthetic oligonucleotide
tttagccagggtaacagagtgacgc

SEQ ID NO: 3520 - DNA, 30 bp, Artificial Sequence
  Description of Artificial Sequence: Synthetic oligonucleotide
tctgttgtttttctcaaaatttctatagag

SEQ ID NO: 3521 - DNA, 18 bp, Artificial Sequence
  Description of Artificial Sequence: Synthetic oligonucleotide
cgggggtggcggggagag

SEQ ID NO: 3522 - DNA, 29 bp, Artificial Sequence
  Description of Artificial Sequence: Synthetic oligonucleotide
tgtggtaagcacttaataattatcagctc

SEQ ID NO: 3523 - DNA, 19 bp, Artificial Sequence
  Description of Artificial Sequence: Synthetic oligonucleotide
ctcttggaccgcagcggaa

SEQ ID NO: 3524 - DNA, 30 bp, Artificial Sequence
  Description of Artificial Sequence: Synthetic oligonucleotide
aaattgctaagacagattttaaatattcac

SEQ ID NO: 3525 - DNA, 21 bp, Artificial Sequence
  Description of Artificial Sequence: Synthetic oligonucleotide
ctgccgcaggaagatgagcac

SEQ ID NO: 3526 - DNA, 29 bp, Artificial Sequence
  Description of Artificial Sequence: Synthetic oligonucleotide
aaatgcaccactcttagttatgtataggc

SEQ ID NO: 3527 - DNA, 19 bp, Artificial Sequence
  Description of Artificial Sequence: Synthetic oligonucleotide
aggggctcgggagctggag

SEQ ID NO: 3528 - DNA, 22 bp, Artificial Sequence
  Description of Artificial Sequence: Synthetic oligonucleotide
gagggtgacccaaggccctatc

SEQ ID NO: 3529 - DNA, 19 bp, Artificial Sequence
  Description of Artificial Sequence: Synthetic oligonucleotide
gcccaggtgtcctggctcg

SEQ ID NO: 3530 - DNA, 22 bp, Artificial Sequence
  Description of Artificial Sequence: Synthetic oligonucleotide
ccgggcaatgagataccacacg

SEQ ID NO: 3531 - DNA, 30 bp, Artificial Sequence
  Description of Artificial Sequence: Synthetic oligonucleotide
ttcaagtatttttgtgtccttgtacagtac

SEQ ID NO: 3532 - DNA, 18 bp, Artificial Sequence
  Description of Artificial Sequence: Synthetic oligonucleotide
gtgggcgcgctgaactgc

SEQ ID NO: 3533 - DNA, 25 bp, Artificial Sequence
  Description of Artificial Sequence: Synthetic oligonucleotide
tttttattgttttttcagtgtggcg

SEQ ID NO: 3534 - DNA, 18 bp, Artificial Sequence
  Description of Artificial Sequence: Synthetic oligonucleotide
gggggcggggcctattcg

SEQ ID NO: 3535 - DNA, 24 bp, Artificial Sequence
  Description of Artificial Sequence: Synthetic oligonucleotide
cacctcctgggtagctgggactac

SEQ ID NO: 3536 - DNA, 18 bp, Artificial Sequence
  Description of Artificial Sequence: Synthetic oligonucleotide
ccgacgggcgcttcctcc

SEQ ID NO: 3537 - DNA, 22 bp, Artificial Sequence
  Description of Artificial Sequence: Synthetic oligonucleotide
gtgagtaactccggcccagggc

SEQ ID NO: 3538 - DNA, 21 bp, Artificial Sequence
  Description of Artificial Sequence: Synthetic oligonucleotide
acaagggcagaggggagctgt

SEQ ID NO: 3539 - DNA, 20 bp, Artificial Sequence
  Description of Artificial Sequence: Synthetic oligonucleotide
acacagggtcccaggctgcg

SEQ ID NO: 3540 - DNA, 29 bp, Artificial Sequence
  Description of Artificial Sequence: Synthetic oligonucleotide
gagtgaaactctatcttcaaaaaaaattt

SEQ ID NO: 3541 - DNA, 30 bp, Artificial Sequence
  Description of Artificial Sequence: Synthetic oligonucleotide
caaggaatttagaaaatcatgcatatgttg

SEQ ID NO: 3542 - DNA, 30 bp, Artificial Sequence
  Description of Artificial Sequence: Synthetic oligonucleotide
tgttggtattttaataaaaattattggcac

SEQ ID NO: 3543 - DNA, 18 bp, Artificial Sequence
  Description of Artificial Sequence: Synthetic oligonucleotide
agaccgcagctccggggg

SEQ ID NO: 3544 - DNA, 18 bp, Artificial Sequence
  Description of Artificial Sequence: Synthetic oligonucleotide
cgctttgacccgcagggc

SEQ ID NO: 3545 - DNA, 22 bp, Artificial Sequence
  Description of Artificial Sequence: Synthetic oligonucleotide
cgttaccatcttccggatcccg

SEQ ID NO: 3546 - DNA, 30 bp, Artificial Sequence
  Description of Artificial Sequence: Synthetic oligonucleotide
ttcagagtattaagagacagagttaagccg

SEQ ID NO: 3547 - DNA, 18 bp, Artificial Sequence
  Description of Artificial Sequence: Synthetic oligonucleotide
gggcccccacccatgccc

SEQ ID NO: 3548 - DNA, 18 bp, Artificial Sequence
  Description of Artificial Sequence: Synthetic oligonucleotide
gcaggcagcggctgtggc

SEQ ID NO: 3549 - DNA, 19 bp, Artificial Sequence
  Description of Artificial Sequence: Synthetic oligonucleotide
ctgtgggcaggcctgaccc

SEQ ID NO: 3550 - DNA, 30 bp, Artificial Sequence
  Description of Artificial Sequence: Synthetic oligonucleotide
tgtgcagttcttgaaatttaagtactcacc

SEQ ID NO: 3551 - DNA, 30 bp, Artificial Sequence
  Description of Artificial Sequence: Synthetic oligonucleotide
gaatagactaagacaataagcaattttgcc

SEQ ID NO: 3552 - DNA, 28 bp, Artificial Sequence
  Description of Artificial Sequence: Synthetic oligonucleotide
ggtatgttttcctttttttccaggattg

SEQ ID NO: 3553 - DNA, 30 bp, Artificial Sequence
  Description of Artificial Sequence: Synthetic oligonucleotide
tcattagcctttgtgtcataaaataaaatc

SEQ ID NO: 3554 - DNA, 20 bp, Artificial Sequence
  Description of Artificial Sequence: Synthetic oligonucleotide
actgcagcctggaactcccc

SEQ ID NO: 3555 - DNA, 18 bp, Artificial Sequence
  Description of Artificial Sequence: Synthetic oligonucleotide
agggggccggccatggag

SEQ ID NO: 3556 - DNA, 21 bp, Artificial Sequence
  Description of Artificial Sequence: Synthetic oligonucleotide
aggagggtcccaccctagccg

SEQ ID NO: 3557 - DNA, 21 bp, Artificial Sequence
  Description of Artificial Sequence: Synthetic oligonucleotide
ctcggcctctggggagaatgc

SEQ ID NO: 3558 - DNA, 28 bp, Artificial Sequence
  Description of Artificial Sequence: Synthetic oligonucleotide
aaatttttttgtcagctaaaaatgtagg

SEQ ID NO: 3559 - DNA, 24 bp, Artificial Sequence
  Description of Artificial Sequence: Synthetic oligonucleotide
tatgtgaccctgggcaagcttttg

SEQ ID NO: 3560 - DNA, 18 bp, Artificial Sequence
  Description of Artificial Sequence: Synthetic oligonucleotide
gcgagctggggcccgacg

SEQ ID NO: 3561 - DNA, 18 bp, Artificial Sequence
  Description of Artificial Sequence: Synthetic oligonucleotide
gctttggccatgccggtg

SEQ ID NO: 3562 - DNA, 30 bp, Artificial Sequence
  Description of Artificial Sequence: Synthetic oligonucleotide
caactctatgtttctttgattctaacacac

SEQ ID NO: 3563 - DNA, 19 bp, Artificial Sequence
  Description of Artificial Sequence: Synthetic oligonucleotide
gccgtggtgatgcacaccc

SEQ ID NO: 3564 - DNA, 19 bp, Artificial Sequence
  Description of Artificial Sequence: Synthetic oligonucleotide
gtggccccgccctctccac

SEQ ID NO: 3565 - DNA, 22 bp, Artificial Sequence
  Description of Artificial Sequence: Synthetic oligonucleotide
tgggagcatgcaagaacaaagg

SEQ ID NO: 3566 - DNA, 29 bp, Artificial Sequence
  Description of Artificial Sequence: Synthetic oligonucleotide
ttgtttttgtttctgtaaaagcacttatg

SEQ ID NO: 3567 - DNA, 30 bp, Artificial Sequence
  Description of Artificial Sequence: Synthetic oligonucleotide
aaaccttacaacatatactcctttccatac

SEQ ID NO: 3568 - DNA, 18 bp, Artificial Sequence
  Description of Artificial Sequence: Synthetic oligonucleotide
ctctaccacccctggccc

SEQ ID NO: 3569 - DNA, 18 bp, Artificial Sequence
  Description of Artificial Sequence: Synthetic oligonucleotide
ggggagggggttgctgtc

SEQ ID NO: 3570 - DNA, 30 bp, Artificial Sequence
  Description of Artificial Sequence: Synthetic oligonucleotide
tgacagactgtaatgcatgtaatatgatga

SEQ ID NO: 3571 - DNA, 30 bp, Artificial Sequence
  Description of Artificial Sequence: Synthetic oligonucleotide
agtttctgtcttagtttatgaacatgaaac

SEQ ID NO: 3572 - DNA, 18 bp, Artificial Sequence
  Description of Artificial Sequence: Synthetic oligonucleotide
cggcgctgcggcaatccg

SEQ ID NO: 3573 - DNA, 19 bp, Artificial Sequence
  Description of Artificial Sequence: Synthetic oligonucleotide
gaggcgcgaacacggaggt

SEQ ID NO: 3574 - DNA, 28 bp, Artificial Sequence
  Description of Artificial Sequence: Synthetic oligonucleotide
agctcgaattgagaaactagttttttcg

SEQ ID NO: 3575 - DNA, 30 bp, Artificial Sequence
  Description of Artificial Sequence: Synthetic oligonucleotide
tttgtattaaaggacacaaattttagacag

SEQ ID NO: 3576 - DNA, 19 bp, Artificial Sequence
  Description of Artificial Sequence: Synthetic oligonucleotide
cagaaggcgtggtccccac

SEQ ID NO: 3577 - DNA, 30 bp, Artificial Sequence
  Description of Artificial Sequence: Synthetic oligonucleotide
gattatgaattatcagggatttctaagaac

SEQ ID NO: 3578 - DNA, 30 bp, Artificial Sequence
  Description of Artificial Sequence: Synthetic oligonucleotide
caggcactattctaactactttacaaaaac

SEQ ID NO: 3579 - DNA, 30 bp, Artificial Sequence
  Description of Artificial Sequence: Synthetic oligonucleotide
cattttaaattcacaaaatatttcttcacg

SEQ ID NO: 3580 - DNA, 18 bp, Artificial Sequence
  Description of Artificial Sequence: Synthetic oligonucleotide
ggggaggcgccgcgttgg

SEQ ID NO: 3581 - DNA, 19 bp, Artificial Sequence
  Description of Artificial Sequence: Synthetic oligonucleotide
ggcctgttacccccaggcg

SEQ ID NO: 3582 - DNA, 20 bp, Artificial Sequence
  Description of Artificial Sequence: Synthetic oligonucleotide
gggctggtggggaaaagagc

SEQ ID NO: 3583 - DNA, 27 bp, Artificial Sequence
  Description of Artificial Sequence: Synthetic oligonucleotide
tgagatatctgctgtacaagggatcac

SEQ ID NO: 3584 - DNA, 30 bp, Artificial Sequence
  Description of Artificial Sequence: Synthetic oligonucleotide
cctgtcttgaatcttatttttttcatttac

SEQ ID NO: 3585 - DNA, 30 bp, Artificial Sequence
  Description of Artificial Sequence: Synthetic oligonucleotide
tggacacttgagaagttatacaattagcca

SEQ ID NO: 3586 - DNA, 18 bp, Artificial Sequence
  Description of Artificial Sequence: Synthetic oligonucleotide
gcgggtctttggggccag

SEQ ID NO: 3587 - DNA, 29 bp, Artificial Sequence
  Description of Artificial Sequence: Synthetic oligonucleotide
aacagaaaatttactattggtggttcaag

SEQ ID NO: 3588 - DNA, 30 bp, Artificial Sequence
  Description of Artificial Sequence: Synthetic oligonucleotide
tgtgctttctcagataattaaagaaataac

SEQ ID NO: 3589 - DNA, 18 bp, Artificial Sequence
  Description of Artificial Sequence: Synthetic oligonucleotide
ccagctgctgggccaccc

SEQ ID NO: 3590 - DNA, 27 bp, Artificial Sequence
  Description of Artificial Sequence: Synthetic oligonucleotide
ttcctttgttgtcttactcattttggg

SEQ ID NO: 3591 - DNA, 28 bp, Artificial Sequence
  Description of Artificial Sequence: Synthetic oligonucleotide
ggtgtcttttgcatattgcaaataatag

SEQ ID NO: 3592 - DNA, 19 bp, Artificial Sequence
  Description of Artificial Sequence: Synthetic oligonucleotide
ctggcccagccactgctgg

SEQ ID NO: 3593 - DNA, 30 bp, Artificial Sequence
  Description of Artificial Sequence: Synthetic oligonucleotide
ttgagatactccttactgtacttaaattgg

SEQ ID NO: 3594 - DNA, 18 bp, Artificial Sequence
  Description of Artificial Sequence: Synthetic oligonucleotide
gggggctcgggggttgcg

SEQ ID NO: 3595 - DNA, 29 bp, Artificial Sequence
  Description of Artificial Sequence: Synthetic oligonucleotide
tttttcattttataatattccatgatgcg

SEQ ID NO: 3596 - DNA, 18 bp, Artificial Sequence
  Description of Artificial Sequence: Synthetic oligonucleotide
ccaggctcccccatccac

SEQ ID NO: 3597 - DNA, 18 bp, Artificial Sequence
  Description of Artificial Sequence: Synthetic oligonucleotide
ccatgccccagccacgcg

SEQ ID NO: 3598 - DNA, 22 bp, Artificial Sequence
  Description of Artificial Sequence: Synthetic oligonucleotide
gttcccgattggccagctcatg

SEQ ID NO: 3599 - DNA, 28 bp, Artificial Sequence
  Description of Artificial Sequence: Synthetic oligonucleotide
cacaaaatccgcagatatcagaattatg

SEQ ID NO: 3600 - DNA, 19 bp, Artificial Sequence
  Description of Artificial Sequence: Synthetic oligonucleotide
acagggcgcctcccggatg

SEQ ID NO: 3601 - DNA, 30 bp, Artificial Sequence
  Description of Artificial Sequence: Synthetic oligonucleotide
tgtataaatagtccattcctttttattgcc

SEQ ID NO: 3602 - DNA, 23 bp, Artificial Sequence
  Description of Artificial Sequence: Synthetic oligonucleotide
aaaaacaaacaaggggaggggtg

SEQ ID NO: 3603 - DNA, 19 bp, Artificial Sequence
  Description of Artificial Sequence: Synthetic oligonucleotide
caggaggacgcattcggcc

SEQ ID NO: 3604 - DNA, 23 bp, Artificial Sequence
  Description of Artificial Sequence: Synthetic oligonucleotide
agctctgcatgttcctcctccag

SEQ ID NO: 3605 - DNA, 29 bp, Artificial Sequence
  Description of Artificial Sequence: Synthetic oligonucleotide
ttaaacacaaggatttttctttatttttg

SEQ ID NO: 3606 - DNA, 28 bp, Artificial Sequence
  Description of Artificial Sequence: Synthetic oligonucleotide
gaaggcctttgttacttacttagctccg

SEQ ID NO: 3607 - DNA, 30 bp, Artificial Sequence
  Description of Artificial Sequence: Synthetic oligonucleotide
catgtggattttgtcattctaatttattac

SEQ ID NO: 3608 - DNA, 19 bp, Artificial Sequence
  Description of Artificial Sequence: Synthetic oligonucleotide
gctccttcccgcagaggcc

SEQ ID NO: 3609 - DNA, 24 bp, Artificial Sequence
  Description of Artificial Sequence: Synthetic oligonucleotide
acgatgacttccagcttcatccat

SEQ ID NO: 3610 - DNA, 19 bp, Artificial Sequence
  Description of Artificial Sequence: Synthetic oligonucleotide
cgccacccattctggctgc

SEQ ID NO: 3611 - DNA, 18 bp, Artificial Sequence
  Description of Artificial Sequence: Synthetic oligonucleotide
cctgaggggcttggggag

SEQ ID NO: 3612 - DNA, 21 bp, Artificial Sequence
  Description of Artificial Sequence: Synthetic oligonucleotide
agccaggcgtcaccttccacg

SEQ ID NO: 3613 - DNA, 18 bp, Artificial Sequence
  Description of Artificial Sequence: Synthetic oligonucleotide
cgcccaagagccagcaag

SEQ ID NO: 3614 - DNA, 29 bp, Artificial Sequence
  Description of Artificial Sequence: Synthetic oligonucleotide
ccaagaagagaaggaaggaatatatattg

SEQ ID NO: 3615 - DNA, 24 bp, Artificial Sequence
  Description of Artificial Sequence: Synthetic oligonucleotide
cactctgtgtcagggggtcagagg

SEQ ID NO: 3616 - DNA, 21 bp, Artificial Sequence
  Description of Artificial Sequence: Synthetic oligonucleotide
acgctgacctgtgctccctcc

SEQ ID NO: 3617 - DNA, 20 bp, Artificial Sequence
  Description of Artificial Sequence: Synthetic oligonucleotide
tcttggagatggggagtttg

SEQ ID NO: 3618 - DNA, 21 bp, Artificial Sequence
  Description of Artificial Sequence: Synthetic oligonucleotide
agcctgaggccacagtcccat

SEQ ID NO: 3619 - DNA, 19 bp, Artificial Sequence
  Description of Artificial Sequence: Synthetic oligonucleotide
gggtgctggggcagagagg

SEQ ID NO: 3620 - DNA, 21 bp, Artificial Sequence
  Description of Artificial Sequence: Synthetic oligonucleotide
actccgcaggccctccagtcc

SEQ ID NO: 3621 - DNA, 30 bp, Artificial Sequence
  Description of Artificial Sequence: Synthetic oligonucleotide
aaatagagaatatagggaaaacacctagac

SEQ ID NO: 3622 - DNA, 30 bp, Artificial Sequence
  Description of Artificial Sequence: Synthetic oligonucleotide
gaatccatttataagtttttgtttaagaag

SEQ ID NO: 3623 - DNA, 30 bp, Artificial Sequence
  Description of Artificial Sequence: Synthetic oligonucleotide
tgtatattatctgtgtttacgtggtagagg

SEQ ID NO: 3624 - DNA, 28 bp, Artificial Sequence
  Description of Artificial Sequence: Synthetic oligonucleotide
aacttaccaaaattgacagtagaagaag

SEQ ID NO: 3625 - DNA, 28 bp, Artificial Sequence
  Description of Artificial Sequence: Synthetic oligonucleotide
aacttaccaaaattgacagtagaagaag

SEQ ID NO: 3626 - DNA, 30 bp, Artificial Sequence
  Description of Artificial Sequence: Synthetic oligonucleotide
agattcgaggttatttacacaactatactg

SEQ ID NO: 3627 - DNA, 29 bp, Artificial Sequence
  Description of Artificial Sequence: Synthetic oligonucleotide
cccatgtttgtatatatacctgtgtgtac

SEQ ID NO: 3628 - DNA, 30 bp, Artificial Sequence
  Description of Artificial Sequence: Synthetic oligonucleotide
ggacacatatttatcagccaactataaatg

SEQ ID NO: 3629 - DNA, 18 bp, Artificial Sequence
  Description of Artificial Sequence: Synthetic oligonucleotide
tgggcccagccccagcag

SEQ ID NO: 3630 - DNA, 18 bp, Artificial Sequence
  Description of Artificial Sequence: Synthetic oligonucleotide
gggcgcccagcccaaccg

SEQ ID NO: 3631 - DNA, 20 bp, Artificial Sequence
  Description of Artificial Sequence: Synthetic oligonucleotide
ctcactgctgggccggtcag

SEQ ID NO: 3632 - DNA, 30 bp, Artificial Sequence
  Description of Artificial Sequence: Synthetic oligonucleotide
aattagctaatcaggtttagtttttttctg

SEQ ID NO: 3633 - DNA, 27 bp, Artificial Sequence
  Description of Artificial Sequence: Synthetic oligonucleotide
ccaaggtgttgggattacaagcataag

SEQ ID NO: 3634 - DNA, 30 bp, Artificial Sequence
  Description of Artificial Sequence: Synthetic oligonucleotide
acatatatgaagaaaactatggacattttt

SEQ ID NO: 3635 - DNA, 27 bp, Artificial Sequence
  Description of Artificial Sequence: Synthetic oligonucleotide
aatctctggagtttaacaaatgatttc

SEQ ID NO: 3636 - DNA, 26 bp, Artificial Sequence
  Description of Artificial Sequence: Synthetic oligonucleotide
cctgaaggaagtggtcactagaccac

SEQ ID NO: 3637 - DNA, 30 bp, Artificial Sequence
  Description of Artificial Sequence: Synthetic oligonucleotide
agttagtaagaaaaataagatgaggatgag

SEQ ID NO: 3638 - DNA, 28 bp, Artificial Sequence
  Description of Artificial Sequence: Synthetic oligonucleotide
ggcaaaaaagtgagactctgtttcaaaa

SEQ ID NO: 3639 - DNA, 30 bp, Artificial Sequence
  Description of Artificial Sequence: Synthetic oligonucleotide
caggtgaaatacaaaaaattcatgaaaatg

SEQ ID NO: 3640 - DNA, 18 bp, Artificial Sequence
  Description of Artificial Sequence: Synthetic oligonucleotide
agaagcaatcgcacaccc

SEQ ID NO: 3641 - DNA, 30 bp, Artificial Sequence
  Description of Artificial Sequence: Synthetic oligonucleotide
gacctttatatctttctagaaacgtatccg

SEQ ID NO: 3642 - DNA, 18 bp, Artificial Sequence
  Description of Artificial Sequence: Synthetic oligonucleotide
aggacccggggagccgcg

SEQ ID NO: 3643 - DNA, 18 bp, Artificial Sequence
  Description of Artificial Sequence: Synthetic oligonucleotide
gcgctgcgtggatggccg

SEQ ID NO: 3644 - DNA, 18 bp, Artificial Sequence
  Description of Artificial Sequence: Synthetic oligonucleotide
accgccttcggggcctgg

SEQ ID NO: 3645 - DNA, 30 bp, Artificial Sequence
  Description of Artificial Sequence: Synthetic oligonucleotide
tgggttatgtaaagtgacatttatattaac

SEQ ID NO: 3646 - DNA, 18 bp, Artificial Sequence
  Description of Artificial Sequence: Synthetic oligonucleotide
ccgaaggcggtgcatggg

SEQ ID NO: 3647 - DNA, 30 bp, Artificial Sequence
  Description of Artificial Sequence: Synthetic oligonucleotide
caaatacttgactcagtattttgaagctag

SEQ ID NO: 3648 - DNA, 27 bp, Artificial Sequence
  Description of Artificial Sequence: Synthetic oligonucleotide
tggtaggtagaaatgagggacgtcatc

SEQ ID NO: 3649 - DNA, 27 bp, Artificial Sequence
  Description of Artificial Sequence: Synthetic oligonucleotide
atggatcacatattgaaatgataatag

SEQ ID NO: 3650 - DNA, 28 bp, Artificial Sequence
  Description of Artificial Sequence: Synthetic oligonucleotide
tctgcagatagtttgaaatttatacatc

SEQ ID NO: 3651 - DNA, 18 bp, Artificial Sequence
  Description of Artificial Sequence: Synthetic oligonucleotide
cccaccgagccccgcccc

SEQ ID NO: 3652 - DNA, 28 bp, Artificial Sequence
  Description of Artificial Sequence: Synthetic oligonucleotide
aacaaaacaaacaaacaaacaaacaaac

SEQ ID NO: 3653 - DNA, 24 bp, Artificial Sequence
  Description of Artificial Sequence: Synthetic oligonucleotide
ctacttaccagcccccctacacac

SEQ ID NO: 3654 - DNA, 30 bp, Artificial Sequence
  Description of Artificial Sequence: Synthetic oligonucleotide
aaataacttttactataaggggaaagatta

SEQ ID NO: 3655 - DNA, 19 bp, Artificial Sequence
  Description of Artificial Sequence: Synthetic oligonucleotide
cgccgcctgctcatctccg

SEQ ID NO: 3656 - DNA, 23 bp, Artificial Sequence
  Description of Artificial Sequence: Synthetic oligonucleotide
cttccatttttgtcccctggacg

SEQ ID NO: 3657 - DNA, 29 bp, Artificial Sequence
  Description of Artificial Sequence: Synthetic oligonucleotide
gacatgtaggcattatctaatggtcaaag

SEQ ID NO: 3658 - DNA, 28 bp, Artificial Sequence
  Description of Artificial Sequence: Synthetic oligonucleotide
agggaacaaataataaagaaacaagatg

SEQ ID NO: 3659 - DNA, 30 bp, Artificial Sequence
  Description of Artificial Sequence: Synthetic oligonucleotide
agatccttaataagtacctcttaaatgaag

SEQ ID NO: 3660 - DNA, 30 bp, Artificial Sequence
  Description of Artificial Sequence: Synthetic oligonucleotide
gactacatcagtagcttataattcttttgg

SEQ ID NO: 3661 - DNA, 19 bp, Artificial Sequence
  Description of Artificial Sequence: Synthetic oligonucleotide
tgccatgttgcctgagatc

SEQ ID NO: 3662 - DNA, 30 bp, Artificial Sequence
  Description of Artificial Sequence: Synthetic oligonucleotide
ttaaatgattgaagtataatttacagacat

SEQ ID NO: 3663 - DNA, 20 bp, Artificial Sequence
  Description of Artificial Sequence: Synthetic oligonucleotide
ggtaatttgtcactgcagcc

SEQ ID NO: 3664 - DNA, 21 bp, Artificial Sequence
  Description of Artificial Sequence: Synthetic oligonucleotide
atgccacacataatttatcgc

SEQ ID NO: 3665 - DNA, 18 bp, Artificial Sequence
  Description of Artificial Sequence: Synthetic oligonucleotide
ccagggcccccaagagcg

SEQ ID NO: 3666 - DNA, 27 bp, Artificial Sequence
  Description of Artificial Sequence: Synthetic oligonucleotide
gtgagactccatctcaaaaaaaaaaag

SEQ ID NO: 3667 - DNA, 30 bp, Artificial Sequence
  Description of Artificial Sequence: Synthetic oligonucleotide
tctgaattatttcagattacatacataaag

SEQ ID NO: 3668 - DNA, 23 bp, Artificial Sequence
  Description of Artificial Sequence: Synthetic oligonucleotide
tggtccctcccccaataggtagc

SEQ ID NO: 3669 - DNA, 18 bp, Artificial Sequence
  Description of Artificial Sequence: Synthetic oligonucleotide
cccatggccccgacgtcg

SEQ ID NO: 3670 - DNA, 26 bp, Artificial Sequence
  Description of Artificial Sequence: Synthetic oligonucleotide
ggatctgtattaggtgctccagagcg

SEQ ID NO: 3671 - DNA, 30 bp, Artificial Sequence
  Description of Artificial Sequence: Synthetic oligonucleotide
tttaactctaatagtctcctttgattatgc

SEQ ID NO: 3672 - DNA, 23 bp, Artificial Sequence
  Description of Artificial Sequence: Synthetic oligonucleotide
ttgtctgggatgttgctcctcac

SEQ ID NO: 3673 - DNA, 22 bp, Artificial Sequence
  Description of Artificial Sequence: Synthetic oligonucleotide
atcgggtccaaatgcaagacca

SEQ ID NO: 3674 - DNA, 24 bp, Artificial Sequence
  Description of Artificial Sequence: Synthetic oligonucleotide
gaaaacacccccactgtgttgagc

SEQ ID NO: 3675 - DNA, 23 bp, Artificial Sequence
  Description of Artificial Sequence: Synthetic oligonucleotide
agccacatctcctgtgggatctg

SEQ ID NO: 3676 - DNA, 24 bp, Artificial Sequence
  Description of Artificial Sequence: Synthetic oligonucleotide
ggctgaattgctggatgattctgc

SEQ ID NO: 3677 - DNA, 25 bp, Artificial Sequence
  Description of Artificial Sequence: Synthetic oligonucleotide
agatgcagtgaaggcacaacctacc

SEQ ID NO: 3678 - DNA, 23 bp, Artificial Sequence
  Description of Artificial Sequence: Synthetic oligonucleotide
tgtccacttgtgcctcccacttg

SEQ ID NO: 3679 - DNA, 18 bp, Artificial Sequence
  Description of Artificial Sequence: Synthetic oligonucleotide
gcttccccagcccggccc

SEQ ID NO: 3680 - DNA, 22 bp, Artificial Sequence
  Description of Artificial Sequence: Synthetic oligonucleotide
cagagcgaggctggtgagtgac

SEQ ID NO: 3681 - DNA, 25 bp, Artificial Sequence
  Description of Artificial Sequence: Synthetic oligonucleotide
ccccatctctaccaaaaaacagaag

SEQ ID NO: 3682 - DNA, 30 bp, Artificial Sequence
  Description of Artificial Sequence: Synthetic oligonucleotide
ttgtagtaggcaagaaaaagaaataaatgg

SEQ ID NO: 3683 - DNA, 25 bp, Artificial Sequence
  Description of Artificial Sequence: Synthetic oligonucleotide
gggagggaaaagggtcctatagaac

SEQ ID NO: 3684 - DNA, 23 bp, Artificial Sequence
  Description of Artificial Sequence: Synthetic oligonucleotide
gcctgaacctgaatcccctgtcg

SEQ ID NO: 3685 - DNA, 21 bp, Artificial Sequence
  Description of Artificial Sequence: Synthetic oligonucleotide
agaatgctgcagatggtggcg

SEQ ID NO: 3686 - DNA, 25 bp, Artificial Sequence
  Description of Artificial Sequence: Synthetic oligonucleotide
ggacactgcattcatttcttttggc

SEQ ID NO: 3687 - DNA, 22 bp, Artificial Sequence
  Description of Artificial Sequence: Synthetic oligonucleotide
cttctgcctccctcatccctcg

SEQ ID NO: 3688 - DNA, 25 bp, Artificial Sequence
  Description of Artificial Sequence: Synthetic oligonucleotide
agcccatcacatgctcaatacattg

SEQ ID NO: 3689 - DNA, 22 bp, Artificial Sequence
  Description of Artificial Sequence: Synthetic oligonucleotide
gagtttgtgcagacgcacagac

SEQ ID NO: 3690 - DNA, 18 bp, Artificial Sequence
  Description of Artificial Sequence: Synthetic oligonucleotide
ggcgcggagagtcccagg

SEQ ID NO: 3691 - DNA, 26 bp, Artificial Sequence
  Description of Artificial Sequence: Synthetic oligonucleotide
tcttgtgtcatatggcttcattgctg

SEQ ID NO: 3692 - DNA, 21 bp, Artificial Sequence
  Description of Artificial Sequence: Synthetic oligonucleotide
gtggtgcgagtgcgtgaatac

SEQ ID NO: 3693 - DNA, 26 bp, Artificial Sequence
  Description of Artificial Sequence: Synthetic oligonucleotide
cgggagtcacagatacattgtctggg

SEQ ID NO: 3694 - DNA, 25 bp, Artificial Sequence
  Description of Artificial Sequence: Synthetic oligonucleotide
agaagctgtagggaacaggcttgtg

SEQ ID NO: 3695 - DNA, 22 bp, Artificial Sequence
  Description of Artificial Sequence: Synthetic oligonucleotide
gaatgctgcagatggtggcagg

SEQ ID NO: 3696 - DNA, 18 bp, Artificial Sequence
  Description of Artificial Sequence: Synthetic oligonucleotide
ctcctccgcgcaggggcc

SEQ ID NO: 3697 - DNA, 23 bp, Artificial Sequence
  Description of Artificial Sequence: Synthetic oligonucleotide
ggacctgggacttcgtcctgatc

SEQ ID NO: 3698 - DNA, 26 bp, Artificial Sequence
  Description of Artificial Sequence: Synthetic oligonucleotide
gggctgttcagtgtcacaacttactg

SEQ ID NO: 3699 - DNA, 24 bp, Artificial Sequence
  Description of Artificial Sequence: Synthetic oligonucleotide
aaagatggagacatctcagccccg

SEQ ID NO: 3700 - DNA, 24 bp, Artificial Sequence
  Description of Artificial Sequence: Synthetic oligonucleotide
ggtgaggacaaggagcaggagaag

SEQ ID NO: 3701 - DNA, 28 bp, Artificial Sequence
  Description of Artificial Sequence: Synthetic oligonucleotide
catagtagattcctgatgggttttctcc

SEQ ID NO: 3702 - DNA, 30 bp, Artificial Sequence
  Description of Artificial Sequence: Synthetic oligonucleotide
agaaaatatattctgtatgatttcaatgtc

SEQ ID NO: 3703 - DNA, 21 bp, Artificial Sequence
  Description of Artificial Sequence: Synthetic oligonucleotide
gggaaaggcctgggtaatggg

SEQ ID NO: 3704 - DNA, 22 bp, Artificial Sequence
  Description of Artificial Sequence: Synthetic oligonucleotide
tgggcagaggggacacaactag

SEQ ID NO: 3705 - DNA, 30 bp, Artificial Sequence
  Description of Artificial Sequence: Synthetic oligonucleotide
tcacagaaaattataaaatgtaaaacactg

SEQ ID NO: 3706 - DNA, 23 bp, Artificial Sequence
  Description of Artificial Sequence: Synthetic oligonucleotide
accccaataaccacccttggttt

SEQ ID NO: 3707 - DNA, 22 bp, Artificial Sequence
  Description of Artificial Sequence: Synthetic oligonucleotide
gtcccttgagggacttcagatc

SEQ ID NO: 3708 - DNA, 18 bp, Artificial Sequence
  Description of Artificial Sequence: Synthetic oligonucleotide
cgcaggacccggggagcc

SEQ ID NO: 3709 - DNA, 25 bp, Artificial Sequence
  Description of Artificial Sequence: Synthetic oligonucleotide
ctggtaggaatgcaaaaaatgtggc

SEQ ID NO: 3710 - DNA, 24 bp, Artificial Sequence
  Description of Artificial Sequence: Synthetic oligonucleotide
ctggtcccaggattgatagcaacg

SEQ ID NO: 3711 - DNA, 22 bp, Artificial Sequence
  Description of Artificial Sequence: Synthetic oligonucleotide
ctgccatagctggagagccctg

SEQ ID NO: 3712 - DNA, 25 bp, Artificial Sequence
  Description of Artificial Sequence: Synthetic oligonucleotide
cacaatctattgtctggcaccaccc

SEQ ID NO: 3713 - DNA, 26 bp, Artificial Sequence
  Description of Artificial Sequence: Synthetic oligonucleotide
gagtggaaagatggtcagagaatggg

SEQ ID NO: 3714 - DNA, 25 bp, Artificial Sequence
  Description of Artificial Sequence: Synthetic oligonucleotide
tccccactgtctactctgatagccc

SEQ ID NO: 3715 - DNA, 21 bp, Artificial Sequence
  Description of Artificial Sequence: Synthetic oligonucleotide
ggtccctctggacctcaggga

SEQ ID NO: 3716 - DNA, 25 bp, Artificial Sequence
  Description of Artificial Sequence: Synthetic oligonucleotide
ggaactttgcccacctttgaagatc

SEQ ID NO: 3717 - DNA, 23 bp, Artificial Sequence
  Description of Artificial Sequence: Synthetic oligonucleotide
gcactgtcactgcctggggtagg

SEQ ID NO: 3718 - DNA, 28 bp, Artificial Sequence
  Description of Artificial Sequence: Synthetic oligonucleotide
aattgcatttgctttaaatgtatcatcg

SEQ ID NO: 3719 - DNA, 21 bp, Artificial Sequence
  Description of Artificial Sequence: Synthetic oligonucleotide
gggtatccgggcgctacgtag

SEQ ID NO: 3720 - DNA, 21 bp, Artificial Sequence
  Description of Artificial Sequence: Synthetic oligonucleotide
agtggagcttggggtccagcg

SEQ ID NO: 3721 - DNA, 24 bp, Artificial Sequence
  Description of Artificial Sequence: Synthetic oligonucleotide
gctcccctttgcctaaaccctatg

SEQ ID NO: 3722 - DNA, 27 bp, Artificial Sequence
  Description of Artificial Sequence: Synthetic oligonucleotide
tgaagaaatgagggaagagataggaag

SEQ ID NO: 3723 - DNA, 21 bp, Artificial Sequence
  Description of Artificial Sequence: Synthetic oligonucleotide
ccccacagctttgatggcagc

SEQ ID NO: 3724 - DNA, 25 bp, Artificial Sequence
  Description of Artificial Sequence: Synthetic oligonucleotide
tctccctgaatcctcaacgctaatg

SEQ ID NO: 3725 - DNA, 23 bp, Artificial Sequence
  Description of Artificial Sequence: Synthetic oligonucleotide
caccacatcctgaaagatggcag

SEQ ID NO: 3726 - DNA, 30 bp, Artificial Sequence
  Description of Artificial Sequence: Synthetic oligonucleotide
ttctttgtgttagcaaacttatttatagac

SEQ ID NO: 3727 - DNA, 26 bp, Artificial Sequence
  Description of Artificial Sequence: Synthetic oligonucleotide
aatggtagaccaaaatccaaccattg

SEQ ID NO: 3728 - DNA, 22 bp, Artificial Sequence
  Description of Artificial Sequence: Synthetic oligonucleotide
cagcctgtcctggacagttccc

SEQ ID NO: 3729 - DNA, 22 bp, Artificial Sequence
  Description of Artificial Sequence: Synthetic oligonucleotide
acccaggggcctcagaaagacg

SEQ ID NO: 3730 - DNA, 24 bp, Artificial Sequence
  Description of Artificial Sequence: Synthetic oligonucleotide
ttccacttggtcatgaagaatgat

SEQ ID NO: 3731 - DNA, 30 bp, Artificial Sequence
  Description of Artificial Sequence: Synthetic oligonucleotide
gctttcctgtttttgtttttcttcttcttc

SEQ ID NO: 3732 - DNA, 19 bp, Artificial Sequence
  Description of Artificial Sequence: Synthetic oligonucleotide
catgccctgctgcactccg

SEQ ID NO: 3733 - DNA, 27 bp, Artificial Sequence
  Description of Artificial Sequence: Synthetic oligonucleotide
ttctcaggtctttatttgctctctcac

SEQ ID NO: 3734 - DNA, 24 bp, Artificial Sequence
  Description of Artificial Sequence: Synthetic oligonucleotide
agcctcaacacatcctcttccctc

SEQ ID NO: 3735 - DNA, 24 bp, Artificial Sequence
  Description of Artificial Sequence: Synthetic oligonucleotide
ttgtagtgatggggacctgatccc

SEQ ID NO: 3736 - DNA, 25 bp, Artificial Sequence
  Description of Artificial Sequence: Synthetic oligonucleotide
gactcagaggagctggagtcagacc

SEQ ID NO: 3737 - DNA, 26 bp, Artificial Sequence
  Description of Artificial Sequence: Synthetic oligonucleotide
tgctattccatcactgggtattcctc

SEQ ID NO: 3738 - DNA, 22 bp, Artificial Sequence
  Description of Artificial Sequence: Synthetic oligonucleotide
gcctctgtggtcacagctcccg

SEQ ID NO: 3739 - DNA, 27 bp, Artificial Sequence
  Description of Artificial Sequence: Synthetic oligonucleotide
tctacaatggcattcaataaagtgcag

SEQ ID NO: 3740 - DNA, 27 bp, Artificial Sequence
  Description of Artificial Sequence: Synthetic oligonucleotide
tcctttctgtatatctgggtcaccatc

SEQ ID NO: 3741 - DNA, 23 bp, Artificial Sequence
  Description of Artificial Sequence: Synthetic oligonucleotide
ccactccgaagtcagcacagagc

SEQ ID NO: 3742 - DNA, 24 bp, Artificial Sequence
  Description of Artificial Sequence: Synthetic oligonucleotide
cccaaaatgcatgaaattcccttg

SEQ ID NO: 3743 - DNA, 24 bp, Artificial Sequence
  Description of Artificial Sequence: Synthetic oligonucleotide
cccctctccccacttattctcctc

SEQ ID NO: 3744 - DNA, 25 bp, Artificial Sequence
  Description of Artificial Sequence: Synthetic oligonucleotide
tctgaaatgccctgtctatagggcg

SEQ ID NO: 3745 - DNA, 21 bp, Artificial Sequence
  Description of Artificial Sequence: Synthetic oligonucleotide
cagtcacccccacttcccacc

SEQ ID NO: 3746 - DNA, 26 bp, Artificial Sequence
  Description of Artificial Sequence: Synthetic oligonucleotide
ccccccacttcttgaaaagacttatc

SEQ ID NO: 3747 - DNA, 21 bp, Artificial Sequence
  Description of Artificial Sequence: Synthetic oligonucleotide
ctgctaagccgctgtccctcc

SEQ ID NO: 3748 - DNA, 20 bp, Artificial Sequence
  Description of Artificial Sequence: Synthetic oligonucleotide
caccaaccaagggctgctgg

SEQ ID NO: 3749 - DNA, 22 bp, Artificial Sequence
  Description of Artificial Sequence: Synthetic oligonucleotide
gaggcttcacccagttagcccg

SEQ ID NO: 3750 - DNA, 24 bp, Artificial Sequence
  Description of Artificial Sequence: Synthetic oligonucleotide
tcctccactagcattatccccagc

SEQ ID NO: 3751 - DNA, 26 bp, Artificial Sequence
  Description of Artificial Sequence: Synthetic oligonucleotide
caatggaaagtgaacaaaaggttccc

SEQ ID NO: 3752 - DNA, 25 bp, Artificial Sequence
  Description of Artificial Sequence: Synthetic oligonucleotide
tggggttaactcccaataaatccag

SEQ ID NO: 3753 - DNA, 23 bp, Artificial Sequence
  Description of Artificial Sequence: Synthetic oligonucleotide
tgctgaattgtcactcatgggcc

SEQ ID NO: 3754 - DNA, 22 bp, Artificial Sequence
  Description of Artificial Sequence: Synthetic oligonucleotide
gtcaatggcgtcactcaccagc

SEQ ID NO: 3755 - DNA, 23 bp, Artificial Sequence
  Description of Artificial Sequence: Synthetic oligonucleotide
tcttctccaaggcctccctcttg

SEQ ID NO: 3756 - DNA, 26 bp, Artificial Sequence
  Description of Artificial Sequence: Synthetic oligonucleotide
cttttctctggacatatgcagcattg

SEQ ID NO: 3757 - DNA, 26 bp, Artificial Sequence
  Description of Artificial Sequence: Synthetic oligonucleotide
ggtcaaataaaagaaggaatggcaag

SEQ ID NO: 3758 - DNA, 26 bp, Artificial Sequence
  Description of Artificial Sequence: Synthetic oligonucleotide
tcagagtatcctttctcctttgcaag

SEQ ID NO: 3759 - DNA, 26 bp, Artificial Sequence
  Description of Artificial Sequence: Synthetic oligonucleotide
tgtgtttgtgaccagaaataagccac

SEQ ID NO: 3760 - DNA, 23 bp, Artificial Sequence
  Description of Artificial Sequence: Synthetic oligonucleotide
tcctctccccttctcaccttgag

SEQ ID NO: 3761 - DNA, 26 bp, Artificial Sequence
  Description of Artificial Sequence: Synthetic oligonucleotide
tttatcattgttaccagcaagagggg

SEQ ID NO: 3762 - DNA, 23 bp, Artificial Sequence
  Description of Artificial Sequence: Synthetic oligonucleotide
aggatctcatttggcatcctgcg

SEQ ID NO: 3763 - DNA, 27 bp, Artificial Sequence
  Description of Artificial Sequence: Synthetic oligonucleotide
cagtagggagatgacagagcattgtag

SEQ ID NO: 3764 - DNA, 23 bp, Artificial Sequence
  Description of Artificial Sequence: Synthetic oligonucleotide
atgtggccagtggctaccgtatg

SEQ ID NO: 3765 - DNA, 27 bp, Artificial Sequence
  Description of Artificial Sequence: Synthetic oligonucleotide
cacaagtattttgcagcagctatcata

SEQ ID NO: 3766 - DNA, 23 bp, Artificial Sequence
  Description of Artificial Sequence: Synthetic oligonucleotide
gagagctggagctgaagttcccc

SEQ ID NO: 3767 - DNA, 23 bp, Artificial Sequence
  Description of Artificial Sequence: Synthetic oligonucleotide
aacagacagggacatcaggcaac

SEQ ID NO: 3768 - DNA, 21 bp, Artificial Sequence
  Description of Artificial Sequence: Synthetic oligonucleotide
accgttgtgccactggacgac

SEQ ID NO: 3769 - DNA, 23 bp, Artificial Sequence
  Description of Artificial Sequence: Synthetic oligonucleotide
aaccccccttctgagacttggac

SEQ ID NO: 3770 - DNA, 23 bp, Artificial Sequence
  Description of Artificial Sequence: Synthetic oligonucleotide
gggagatgggtaaagaggggaac

SEQ ID NO: 3771 - DNA, 20 bp, Artificial Sequence
  Description of Artificial Sequence: Synthetic oligonucleotide
gtgggagggagcgtgaggca

SEQ ID NO: 3772 - DNA, 25 bp, Artificial Sequence
  Description of Artificial Sequence: Synthetic oligonucleotide
ggctctccatgggttcttagagatc

SEQ ID NO: 3773 - DNA, 27 bp, Artificial Sequence
  Description of Artificial Sequence: Synthetic oligonucleotide
agggaactgaaagtcatttctcaagtg

SEQ ID NO: 3774 - DNA, 27 bp, Artificial Sequence
  Description of Artificial Sequence: Synthetic oligonucleotide
gctcttctcaccaaaacttaaggctcc

SEQ ID NO: 3775 - DNA, 25 bp, Artificial Sequence
  Description of Artificial Sequence: Synthetic oligonucleotide
acagcctaaggagggaaacaaaaac

SEQ ID NO: 3776 - DNA, 21 bp, Artificial Sequence
  Description of Artificial Sequence: Synthetic oligonucleotide
ggtcatgagggaacggaagcg

SEQ ID NO: 3777 - DNA, 24 bp, Artificial Sequence
  Description of Artificial Sequence: Synthetic oligonucleotide
tcaagtagtccgtgtctggcaagc

SEQ ID NO: 3778 - DNA, 25 bp, Artificial Sequence
  Description of Artificial Sequence: Synthetic oligonucleotide
attagaaaggttaaggaaccgctcc

SEQ ID NO: 3779 - DNA, 28 bp, Artificial Sequence
  Description of Artificial Sequence: Synthetic oligonucleotide
aacaacccaggtatgctggtattaatat

SEQ ID NO: 3780 - DNA, 25 bp, Artificial Sequence
  Description of Artificial Sequence: Synthetic oligonucleotide
tcactgtgggtggaggtaatggtac

SEQ ID NO: 3781 - DNA, 18 bp, Artificial Sequence
  Description of Artificial Sequence: Synthetic oligonucleotide
cagccccagtgccctccg

SEQ ID NO: 3782 - DNA, 24 bp, Artificial Sequence
  Description of Artificial Sequence: Synthetic oligonucleotide
ggatggctgtcacacctgaaagtc

SEQ ID NO: 3783 - DNA, 25 bp, Artificial Sequence
  Description of Artificial Sequence: Synthetic oligonucleotide
aaacctgcacatataccccagaatc

SEQ ID NO: 3784 - DNA, 26 bp, Artificial Sequence
  Description of Artificial Sequence: Synthetic oligonucleotide
cctcctatgatgcttgtgtgaaactc

SEQ ID NO: 3785 - DNA, 22 bp, Artificial Sequence
  Description of Artificial Sequence: Synthetic oligonucleotide
ggatgtgttgaggctggaccag

SEQ ID NO: 3786 - DNA, 22 bp, Artificial Sequence
  Description of Artificial Sequence: Synthetic oligonucleotide
agagcgcgctcatctttttccg

SEQ ID NO: 3787 - DNA, 21 bp, Artificial Sequence
  Description of Artificial Sequence: Synthetic oligonucleotide
atgcctcatttgcctctcgcc

SEQ ID NO: 3788 - DNA, 19 bp, Artificial Sequence
  Description of Artificial Sequence: Synthetic oligonucleotide
atcgctggggcagggctac

SEQ ID NO: 3789 - DNA, 26 bp, Artificial Sequence
  Description of Artificial Sequence: Synthetic oligonucleotide
tggtccacagaatttttatagttggg

SEQ ID NO: 3790 - DNA, 22 bp, Artificial Sequence
  Description of Artificial Sequence: Synthetic oligonucleotide
ggtggaggatcctggctaccac

SEQ ID NO: 3791 - DNA, 20 bp, Artificial Sequence
  Description of Artificial Sequence: Synthetic oligonucleotide
aggcctggcccatctgcagg

SEQ ID NO: 3792 - DNA, 24 bp, Artificial Sequence
  Description of Artificial Sequence: Synthetic oligonucleotide
caaccttgacagatgctccagctg

SEQ ID NO: 3793 - DNA, 24 bp, Artificial Sequence
  Description of Artificial Sequence: Synthetic oligonucleotide
cgggccaacaattactcacatttg

SEQ ID NO: 3794 - DNA, 23 bp, Artificial Sequence
  Description of Artificial Sequence: Synthetic oligonucleotide
gtctgagcatcgcatccaagatg

SEQ ID NO: 3795 - DNA, 30 bp, Artificial Sequence
  Description of Artificial Sequence: Synthetic oligonucleotide
tctgttagacatagtctcagatgcctattg

SEQ ID NO: 3796 - DNA, 30 bp, Artificial Sequence
  Description of Artificial Sequence: Synthetic oligonucleotide
gagtgcactctgtactagacacaatagaag

SEQ ID NO: 3797 - DNA, 29 bp, Artificial Sequence
  Description of Artificial Sequence: Synthetic oligonucleotide
tggattatgttgtccatctaaactttttg

SEQ ID NO: 3798 - DNA, 25 bp, Artificial Sequence
  Description of Artificial Sequence: Synthetic oligonucleotide
tctgaatcaccacctggagaaaagc

SEQ ID NO: 3799 - DNA, 22 bp, Artificial Sequence
  Description of Artificial Sequence: Synthetic oligonucleotide
tccaaaccctgttccaaagccc

SEQ ID NO: 3800 - DNA, 22 bp, Artificial Sequence
  Description of Artificial Sequence: Synthetic oligonucleotide
cctgcatcccataccgtttccg

SEQ ID NO: 3801 - DNA, 18 bp, Artificial Sequence
  Description of Artificial Sequence: Synthetic oligonucleotide
cctcgagggcctccacca

SEQ ID NO: 3802 - DNA, 28 bp, Artificial Sequence
  Description of Artificial Sequence: Synthetic oligonucleotide
caatttttctgattgcctcatatcaatt

SEQ ID NO: 3803 - DNA, 21 bp, Artificial Sequence
  Description of Artificial Sequence: Synthetic oligonucleotide
cagggttgctgtgaggctcag

SEQ ID NO: 3804 - DNA, 27 bp, Artificial Sequence
  Description of Artificial Sequence: Synthetic oligonucleotide
tgcttattccaaattgaacctctttac

SEQ ID NO: 3805 - DNA, 20 bp, Artificial Sequence
  Description of Artificial Sequence: Synthetic oligonucleotide
cactggctccactgagggcg

SEQ ID NO: 3806 - DNA, 22 bp, Artificial Sequence
  Description of Artificial Sequence: Synthetic oligonucleotide
actttgctgggacagggaggcc

SEQ ID NO: 3807 - DNA, 28 bp, Artificial Sequence
  Description of Artificial Sequence: Synthetic oligonucleotide
gttccatggactcttaggaattagactc

SEQ ID NO: 3808 - DNA, 20 bp, Artificial Sequence
  Description of Artificial Sequence: Synthetic oligonucleotide
ctgcctggcccagccttctc

SEQ ID NO: 3809 - DNA, 29 bp, Artificial Sequence
  Description of Artificial Sequence: Synthetic oligonucleotide
ttaagtattcactatgcatcaagtgcttc

SEQ ID NO: 3810 - DNA, 24 bp, Artificial Sequence
  Description of Artificial Sequence: Synthetic oligonucleotide
caccagtgtgcagtgacctgattc

SEQ ID NO: 3811 - DNA, 24 bp, Artificial Sequence
  Description of Artificial Sequence: Synthetic oligonucleotide
cctgaacactgtcattcacccaac

SEQ ID NO: 3812 - DNA, 24 bp, Artificial Sequence
  Description of Artificial Sequence: Synthetic oligonucleotide
caattcctggttcactcctggacg

SEQ ID NO: 3813 - DNA, 24 bp, Artificial Sequence
  Description of Artificial Sequence: Synthetic oligonucleotide
tctttggtgaagtagcccacaggg

SEQ ID NO: 3814 - DNA, 23 bp, Artificial Sequence
  Description of Artificial Sequence: Synthetic oligonucleotide
ctgctttccaggcttggagtctg

SEQ ID NO: 3815 - DNA, 24 bp, Artificial Sequence
  Description of Artificial Sequence: Synthetic oligonucleotide
agaacgtgaacaggccaagaaagt

SEQ ID NO: 3816 - DNA, 23 bp, Artificial Sequence
  Description of Artificial Sequence: Synthetic oligonucleotide
acctgtggaagttgtgtccaccc

SEQ ID NO: 3817 - DNA, 25 bp, Artificial Sequence
  Description of Artificial Sequence: Synthetic oligonucleotide
cctaatggcaaggtcccataagctc

SEQ ID NO: 3818 - DNA, 22 bp, Artificial Sequence
  Description of Artificial Sequence: Synthetic oligonucleotide
attaatgggaaggctgcacggc

SEQ ID NO: 3819 - DNA, 22 bp, Artificial Sequence
  Description of Artificial Sequence: Synthetic oligonucleotide
ttgtgcagggttgtatccccag

SEQ ID NO: 3820 - DNA, 25 bp, Artificial Sequence
  Description of Artificial Sequence: Synthetic oligonucleotide
ccacctcgttccaccctttagttag

SEQ ID NO: 3821 - DNA, 22 bp, Artificial Sequence
  Description of Artificial Sequence: Synthetic oligonucleotide
ggtcacctccagtggagtggtg

SEQ ID NO: 3822 - DNA, 23 bp, Artificial Sequence
  Description of Artificial Sequence: Synthetic oligonucleotide
gccattgggaatagtgctgctac

SEQ ID NO: 3823 - DNA, 25 bp, Artificial Sequence
  Description of Artificial Sequence: Synthetic oligonucleotide
ggggggacgtaagggaagaataatg

SEQ ID NO: 3824 - DNA, 23 bp, Artificial Sequence
  Description of Artificial Sequence: Synthetic oligonucleotide
actgtcatctccccattgccttc

SEQ ID NO: 3825 - DNA, 22 bp, Artificial Sequence
  Description of Artificial Sequence: Synthetic oligonucleotide
ccaagctcttggcctgagttga

SEQ ID NO: 3826 - DNA, 25 bp, Artificial Sequence
  Description of Artificial Sequence: Synthetic oligonucleotide
actcaatgagcaggtccctcactac

SEQ ID NO: 3827 - DNA, 21 bp, Artificial Sequence
  Description of Artificial Sequence: Synthetic oligonucleotide
ggggtctgtcctcgaagcagg

SEQ ID NO: 3828 - DNA, 25 bp, Artificial Sequence
  Description of Artificial Sequence: Synthetic oligonucleotide
tctgtccctcctttctctgaatccc

SEQ ID NO: 3829 - DNA, 23 bp, Artificial Sequence
  Description of Artificial Sequence: Synthetic oligonucleotide
tacctgctgctcatccagccagg

SEQ ID NO: 3830 - DNA, 22 bp, Artificial Sequence
  Description of Artificial Sequence: Synthetic oligonucleotide
accgtcatccctacccaaggac

SEQ ID NO: 3831 - DNA, 24 bp, Artificial Sequence
  Description of Artificial Sequence: Synthetic oligonucleotide
gggacagcaaaccaagacaaaaac

SEQ ID NO: 3832 - DNA, 25 bp, Artificial Sequence
  Description of Artificial Sequence: Synthetic oligonucleotide
aagggaatgcccagtacctactgat

SEQ ID NO: 3833 - DNA, 22 bp, Artificial Sequence
  Description of Artificial Sequence: Synthetic oligonucleotide
ctgttgctcgttcattgcccag

SEQ ID NO: 3834 - DNA, 24 bp, Artificial Sequence
  Description of Artificial Sequence: Synthetic oligonucleotide
acatcttagcgtccagatgacccc

SEQ ID NO: 3835 - DNA, 25 bp, Artificial Sequence
  Description of Artificial Sequence: Synthetic oligonucleotide
tggagctaggattctggacatgaaa

SEQ ID NO: 3836 - DNA, 23 bp, Artificial Sequence
  Description of Artificial Sequence: Synthetic oligonucleotide
ggaaaatgggaccaagaggtcca

SEQ ID NO: 3837 - DNA, 24 bp, Artificial Sequence
  Description of Artificial Sequence: Synthetic oligonucleotide
taaggccagtcttcagtgtccaac

SEQ ID NO: 3838 - DNA, 21 bp, Artificial Sequence
  Description of Artificial Sequence: Synthetic oligonucleotide
ctatgcatgcatgtggccgtc

SEQ ID NO: 3839 - DNA, 21 bp, Artificial Sequence
  Description of Artificial Sequence: Synthetic oligonucleotide
cactcttggagtcctgggggg

SEQ ID NO: 3840 - DNA, 25 bp, Artificial Sequence
  Description of Artificial Sequence: Synthetic oligonucleotide
ctgagtttgcagtggagagtgaaac

SEQ ID NO: 3841 - DNA, 22 bp, Artificial Sequence
  Description of Artificial Sequence: Synthetic oligonucleotide
ctggctgtggacctcagaaggc

SEQ ID NO: 3842 - DNA, 21 bp, Artificial Sequence
  Description of Artificial Sequence: Synthetic oligonucleotide
cccttacgggtgtgtcccctc

SEQ ID NO: 3843 - DNA, 26 bp, Artificial Sequence
  Description of Artificial Sequence: Synthetic oligonucleotide
tcactgctacaacatgcaaggaactg

SEQ ID NO: 3844 - DNA, 21 bp, Artificial Sequence
  Description of Artificial Sequence: Synthetic oligonucleotide
ccctcaccccattgcaagtga

SEQ ID NO: 3845 - DNA, 25 bp, Artificial Sequence
  Description of Artificial Sequence: Synthetic oligonucleotide
tgcactcctaagctgcatatgcttc

SEQ ID NO: 3846 - DNA, 26 bp, Artificial Sequence
  Description of Artificial Sequence: Synthetic oligonucleotide
caggaatggagagaagggtaatggtg

SEQ ID NO: 3847 - DNA, 24 bp, Artificial Sequence
  Description of Artificial Sequence: Synthetic oligonucleotide
ccatgtatttgacttgcagcaggc

SEQ ID NO: 3848 - DNA, 24 bp, Artificial Sequence
  Description of Artificial Sequence: Synthetic oligonucleotide
caccccatgctttacagaactgag

SEQ ID NO: 3849 - DNA, 22 bp, Artificial Sequence
  Description of Artificial Sequence: Synthetic oligonucleotide
taccccaggcagcaattgtgcc

SEQ ID NO: 3850 - DNA, 25 bp, Artificial Sequence
  Description of Artificial Sequence: Synthetic oligonucleotide
gtggctccttacaattctctgtggc

SEQ ID NO: 3851 - DNA, 21 bp, Artificial Sequence
  Description of Artificial Sequence: Synthetic oligonucleotide
ctcatctccacccccacctgc

SEQ ID NO: 3852 - DNA, 26 bp, Artificial Sequence
  Description of Artificial Sequence: Synthetic oligonucleotide
gggccaagaggaaatactcagttttg

SEQ ID NO: 3853 - DNA, 25 bp, Artificial Sequence
  Description of Artificial Sequence: Synthetic oligonucleotide
tgtgtgtctgggagtgagaacttcc

SEQ ID NO: 3854 - DNA, 24 bp, Artificial Sequence
  Description of Artificial Sequence: Synthetic oligonucleotide
gtctgtcctcagcagtctttcccc

SEQ ID NO: 3855 - DNA, 26 bp, Artificial Sequence
  Description of Artificial Sequence: Synthetic oligonucleotide
tggggaacaccattgaagtaaaatcg

SEQ ID NO: 3856 - DNA, 25 bp, Artificial Sequence
  Description of Artificial Sequence: Synthetic oligonucleotide
gaacaggagagaaacctgtttggag

SEQ ID NO: 3857 - DNA, 24 bp, Artificial Sequence
  Description of Artificial Sequence: Synthetic oligonucleotide
ccaagtccttcattttgtccaggg

SEQ ID NO: 3858 - DNA, 24 bp, Artificial Sequence
  Description of Artificial Sequence: Synthetic oligonucleotide
tgaattcttcagcctccctcttgc

SEQ ID NO: 3859 - DNA, 24 bp, Artificial Sequence
  Description of Artificial Sequence: Synthetic oligonucleotide
gggaaataatgcccacaggactcc

SEQ ID NO: 3860 - DNA, 26 bp, Artificial Sequence
  Description of Artificial Sequence: Synthetic oligonucleotide
caggccaatctggaagataaaaaagg

SEQ ID NO: 3861 - DNA, 25 bp, Artificial Sequence
  Description of Artificial Sequence: Synthetic oligonucleotide
ctccatccaaaagacacttctgctg

SEQ ID NO: 3862 - DNA, 23 bp, Artificial Sequence
  Description of Artificial Sequence: Synthetic oligonucleotide
ctcccagactctggcttcatgac

SEQ ID NO: 3863 - DNA, 26 bp, Artificial Sequence
  Description of Artificial Sequence: Synthetic oligonucleotide
tgccaggtaggatgctatcacaatac

SEQ ID NO: 3864 - DNA, 24 bp, Artificial Sequence
  Description of Artificial Sequence: Synthetic oligonucleotide
gctactcctcgagctgtctgaccg

SEQ ID NO: 3865 - DNA, 25 bp, Artificial Sequence
  Description of Artificial Sequence: Synthetic oligonucleotide
aaatagctttgccctgtcatttccc

SEQ ID NO: 3866 - DNA, 26 bp, Artificial Sequence
  Description of Artificial Sequence: Synthetic oligonucleotide
ccactataacctacgggggaaaaaag

SEQ ID NO: 3867 - DNA, 26 bp, Artificial Sequence
  Description of Artificial Sequence: Synthetic oligonucleotide
gctttttgcaactgcctaacatgtgg

SEQ ID NO: 3868 - DNA, 26 bp, Artificial Sequence
  Description of Artificial Sequence: Synthetic oligonucleotide
ggtctcagcgatgatcaagatatcac

SEQ ID NO: 3869 - DNA, 25 bp, Artificial Sequence
  Description of Artificial Sequence: Synthetic oligonucleotide
catcacttcctaagctcccaggacc

SEQ ID NO: 3870 - DNA, 25 bp, Artificial Sequence
  Description of Artificial Sequence: Synthetic oligonucleotide
tgaatgcctggaaggtgaatacacg

SEQ ID NO: 3871 - DNA, 25 bp, Artificial Sequence
  Description of Artificial Sequence: Synthetic oligonucleotide
caatcaattaaatggtttgctgcca

SEQ ID NO: 3872 - DNA, 24 bp, Artificial Sequence
  Description of Artificial Sequence: Synthetic oligonucleotide
tgctcactggaatctccatgagcc

SEQ ID NO: 3873 - DNA, 24 bp, Artificial Sequence
  Description of Artificial Sequence: Synthetic oligonucleotide
ccacgaatccagtgtaggacacag

SEQ ID NO: 3874 - DNA, 26 bp, Artificial Sequence
  Description of Artificial Sequence: Synthetic oligonucleotide
cctctggaagctacaggtctgtttcg

SEQ ID NO: 3875 - DNA, 24 bp, Artificial Sequence
  Description of Artificial Sequence: Synthetic oligonucleotide
ctccgatcctagactccattcccc

SEQ ID NO: 3876 - DNA, 22 bp, Artificial Sequence
  Description of Artificial Sequence: Synthetic oligonucleotide
aggaccacgaggccatgaaaac

SEQ ID NO: 3877 - DNA, 21 bp, Artificial Sequence
  Description of Artificial Sequence: Synthetic oligonucleotide
ctggacttggcctcacggctg

SEQ ID NO: 3878 - DNA, 21 bp, Artificial Sequence
  Description of Artificial Sequence: Synthetic oligonucleotide
ctgaggccatcagcactgcac

SEQ ID NO: 3879 - DNA, 24 bp, Artificial Sequence
  Description of Artificial Sequence: Synthetic oligonucleotide
ggatttgtggtccttggattcacg

SEQ ID NO: 3880 - DNA, 25 bp, Artificial Sequence
  Description of Artificial Sequence: Synthetic oligonucleotide
ggggtatgctatggaatagggtgac

SEQ ID NO: 3881 - DNA, 25 bp, Artificial Sequence
  Description of Artificial Sequence: Synthetic oligonucleotide
ctgctcaagagaagcacatgaaaac

SEQ ID NO: 3882 - DNA, 24 bp, Artificial Sequence
  Description of Artificial Sequence: Synthetic oligonucleotide
gccccagattccgtgtctaagaac

SEQ ID NO: 3883 - DNA, 25 bp, Artificial Sequence
  Description of Artificial Sequence: Synthetic oligonucleotide
ttttctgcctctcactggaattttg

SEQ ID NO: 3884 - DNA, 23 bp, Artificial Sequence
  Description of Artificial Sequence: Synthetic oligonucleotide
ggcatgtctcacatgatggcagg

SEQ ID NO: 3885 - DNA, 26 bp, Artificial Sequence
  Description of Artificial Sequence: Synthetic oligonucleotide
gctgtgcagtaatctaggctgaaggg

SEQ ID NO: 3886 - DNA, 26 bp, Artificial Sequence
  Description of Artificial Sequence: Synthetic oligonucleotide
tcctactaagtgaaatgtggcatggg

SEQ ID NO: 3887 - DNA, 27 bp, Artificial Sequence
  Description of Artificial Sequence: Synthetic oligonucleotide
gcagactacatgcaaaagctatggtga

SEQ ID NO: 3888 - DNA, 25 bp, Artificial Sequence
  Description of Artificial Sequence: Synthetic oligonucleotide
ttttttggttcctccgacttgtctg

SEQ ID NO: 3889 - DNA, 22 bp, Artificial Sequence
  Description of Artificial Sequence: Synthetic oligonucleotide
gctggccatctctccaggtctg

SEQ ID NO: 3890 - DNA, 25 bp, Artificial Sequence
  Description of Artificial Sequence: Synthetic oligonucleotide
tgaagggctacgtggagtgtaaggg

SEQ ID NO: 3891 - DNA, 25 bp, Artificial Sequence
  Description of Artificial Sequence: Synthetic oligonucleotide
catgcatctgttgacataactgcac

SEQ ID NO: 3892 - DNA, 23 bp, Artificial Sequence
  Description of Artificial Sequence: Synthetic oligonucleotide
tagaaccctgctgggagattgca

SEQ ID NO: 3893 - DNA, 22 bp, Artificial Sequence
  Description of Artificial Sequence: Synthetic oligonucleotide
cccccactcggtctttccaatg

SEQ ID NO: 3894 - DNA, 21 bp, Artificial Sequence
  Description of Artificial Sequence: Synthetic oligonucleotide
ctggtacctgcgcattgcagc

SEQ ID NO: 3895 - DNA, 25 bp, Artificial Sequence
  Description of Artificial Sequence: Synthetic oligonucleotide
tgaacaccactggagagtttcaaag

SEQ ID NO: 3896 - DNA, 27 bp, Artificial Sequence
  Description of Artificial Sequence: Synthetic oligonucleotide
gcagacactgatggtcttcagatcacg

SEQ ID NO: 3897 - DNA, 24 bp, Artificial Sequence
  Description of Artificial Sequence: Synthetic oligonucleotide
tcaaagcctgggacatttatttgc

SEQ ID NO: 3898 - DNA, 23 bp, Artificial Sequence
  Description of Artificial Sequence: Synthetic oligonucleotide
ggtggcacttgtctgcagtcctg

SEQ ID NO: 3899 - DNA, 25 bp, Artificial Sequence
  Description of Artificial Sequence: Synthetic oligonucleotide
ccaaacctgcttccatcttttgatc

SEQ ID NO: 3900 - DNA, 22 bp, Artificial Sequence
  Description of Artificial Sequence: Synthetic oligonucleotide
aagggtgttgctgatgcctccc

SEQ ID NO: 3901 - DNA, 27 bp, Artificial Sequence
  Description of Artificial Sequence: Synthetic oligonucleotide
ccctagccagtcttgagtctcatcatc

SEQ ID NO: 3902 - DNA, 27 bp, Artificial Sequence
  Description of Artificial Sequence: Synthetic oligonucleotide
gggagtgtacggcagttaaggtagttg

SEQ ID NO: 3903 - DNA, 23 bp, Artificial Sequence
  Description of Artificial Sequence: Synthetic oligonucleotide
ggggccattgatccacacatacg

SEQ ID NO: 3904 - DNA, 25 bp, Artificial Sequence
  Description of Artificial Sequence: Synthetic oligonucleotide
ttgttcttcctcaagaatgccaatc

SEQ ID NO: 3905 - DNA, 27 bp, Artificial Sequence
  Description of Artificial Sequence: Synthetic oligonucleotide
ccacaagacagttacctaggatgcctg

SEQ ID NO: 3906 - DNA, 23 bp, Artificial Sequence
  Description of Artificial Sequence: Synthetic oligonucleotide
tgttttcaccaggggtagtggtg

SEQ ID NO: 3907 - DNA, 21 bp, Artificial Sequence
  Description of Artificial Sequence: Synthetic oligonucleotide
cctccaccataggcttccccc

SEQ ID NO: 3908 - DNA, 27 bp, Artificial Sequence
  Description of Artificial Sequence: Synthetic oligonucleotide
caactcttaattggccctcaaaacttg

SEQ ID NO: 3909 - DNA, 23 bp, Artificial Sequence
  Description of Artificial Sequence: Synthetic oligonucleotide
gcaagctcccaaagcatattccc

SEQ ID NO: 3910 - DNA, 23 bp, Artificial Sequence
  Description of Artificial Sequence: Synthetic oligonucleotide
caagggacttccagagattcggc

SEQ ID NO: 3911 - DNA, 26 bp, Artificial Sequence
  Description of Artificial Sequence: Synthetic oligonucleotide
ttgttgggtgatatggtaaatggatg

SEQ ID NO: 3912 - DNA, 23 bp, Artificial Sequence
  Description of Artificial Sequence: Synthetic oligonucleotide
caactgaaaaaggcagggttgag

SEQ ID NO: 3913 - DNA, 23 bp, Artificial Sequence
  Description of Artificial Sequence: Synthetic oligonucleotide
cctaaaacactccctcgggctac

SEQ ID NO: 3914 - DNA, 22 bp, Artificial Sequence
  Description of Artificial Sequence: Synthetic oligonucleotide
ctgtgttttccagcacagcccc

SEQ ID NO: 3915 - DNA, 26 bp, Artificial Sequence
  Description of Artificial Sequence: Synthetic oligonucleotide
tttatgggcagaacatttgaaagaag

SEQ ID NO: 3916 - DNA, 27 bp, Artificial Sequence
  Description of Artificial Sequence: Synthetic oligonucleotide
gcatagttttgagtttgtgcctctttg

SEQ ID NO: 3917 - DNA, 25 bp, Artificial Sequence
  Description of Artificial Sequence: Synthetic oligonucleotide
tggctacaagtttatgccccagtag

SEQ ID NO: 3918 - DNA, 24 bp, Artificial Sequence
  Description of Artificial Sequence: Synthetic oligonucleotide
tgatccagcaggaaaaaagaggac

SEQ ID NO: 3919 - DNA, 19 bp, Artificial Sequence
  Description of Artificial Sequence: Synthetic oligonucleotide
cgcacttttcagctgcggg

SEQ ID NO: 3920 - DNA, 26 bp, Artificial Sequence
  Description of Artificial Sequence: Synthetic oligonucleotide
ttcagtgtttgtctcttgcagaaacg

SEQ ID NO: 3921 - DNA, 27 bp, Artificial Sequence
  Description of Artificial Sequence: Synthetic oligonucleotide
catgtgggatccacaacactttaattc

SEQ ID NO: 3922 - DNA, 27 bp, Artificial Sequence
  Description of Artificial Sequence: Synthetic oligonucleotide
tctagattcgtgcctgaatgaaatttt

SEQ ID NO: 3923 - DNA, 24 bp, Artificial Sequence
  Description of Artificial Sequence: Synthetic oligonucleotide
acctgggcaatgaagtcaacactg

SEQ ID NO: 3924 - DNA, 24 bp, Artificial Sequence
  Description of Artificial Sequence: Synthetic oligonucleotide
attccactgatcttgatgttgcag

SEQ ID NO: 3925 - DNA, 20 bp, Artificial Sequence
  Description of Artificial Sequence: Synthetic oligonucleotide
gtgggcagtgggttttgccc

SEQ ID NO: 3926 - DNA, 23 bp, Artificial Sequence
  Description of Artificial Sequence: Synthetic oligonucleotide
cgctcatctccatggctatcgag

SEQ ID NO: 3927 - DNA, 27 bp, Artificial Sequence
  Description of Artificial Sequence: Synthetic oligonucleotide
ccaaaaagtggaagaagtgtagctggg

SEQ ID NO: 3928 - DNA, 27 bp, Artificial Sequence
  Description of Artificial Sequence: Synthetic oligonucleotide
gctgggaacagggagaataagagaaga

SEQ ID NO: 3929 - DNA, 26 bp, Artificial Sequence
  Description of Artificial Sequence: Synthetic oligonucleotide
gattagcatagccattgtgggaaacg

SEQ ID NO: 3930 - DNA, 20 bp, Artificial Sequence
  Description of Artificial Sequence: Synthetic oligonucleotide
tctgaggctcccttgccccc

SEQ ID NO: 3931 - DNA, 26 bp, Artificial Sequence
  Description of Artificial Sequence: Synthetic oligonucleotide
aaatgagttgatttggaacacctccc

SEQ ID NO: 3932 - DNA, 19 bp, Artificial Sequence
  Description of Artificial Sequence: Synthetic oligonucleotide
gtgagcaagggtcggggag

SEQ ID NO: 3933 - DNA, 21 bp, Artificial Sequence
  Description of Artificial Sequence: Synthetic oligonucleotide
agcacaggggctttgggttgc

SEQ ID NO: 3934 - DNA, 25 bp, Artificial Sequence
  Description of Artificial Sequence: Synthetic oligonucleotide
ttgatgcttcctaaccatgaatgtg

SEQ ID NO: 3935 - DNA, 27 bp, Artificial Sequence
  Description of Artificial Sequence: Synthetic oligonucleotide
atgaaggactgccttcaaataattcac

SEQ ID NO: 3936 - DNA, 26 bp, Artificial Sequence
  Description of Artificial Sequence: Synthetic oligonucleotide
tgagatagaaatggttctttgtggcg

SEQ ID NO: 3937 - DNA, 24 bp, Artificial Sequence
  Description of Artificial Sequence: Synthetic oligonucleotide
aggcgttcgaaaattgtttcctcc

SEQ ID NO: 3938 - DNA, 19 bp, Artificial Sequence
  Description of Artificial Sequence: Synthetic oligonucleotide
agcaggcctctcgagggcg

SEQ ID NO: 3939 - DNA, 22 bp, Artificial Sequence
  Description of Artificial Sequence: Synthetic oligonucleotide
ctgcagctccgactctgagccg

SEQ ID NO: 3940 - DNA, 27 bp, Artificial Sequence
  Description of Artificial Sequence: Synthetic oligonucleotide
ttgtgaaatgcagtactgttaccctcc

SEQ ID NO: 3941 - DNA, 25 bp, Artificial Sequence
  Description of Artificial Sequence: Synthetic oligonucleotide
gccagtcatagctgtcaacaatccg

SEQ ID NO: 3942 - DNA, 22 bp, Artificial Sequence
  Description of Artificial Sequence: Synthetic oligonucleotide
aggtactcaacccgctctgggg

SEQ ID NO: 3943 - DNA, 24 bp, Artificial Sequence
  Description of Artificial Sequence: Synthetic oligonucleotide
ccaaagatgaaatgtcccaggaga

SEQ ID NO: 3944 - DNA, 27 bp, Artificial Sequence
  Description of Artificial Sequence: Synthetic oligonucleotide
catgatcctggtgatttcaaagactac

SEQ ID NO: 3945 - DNA, 25 bp, Artificial Sequence
  Description of Artificial Sequence: Synthetic oligonucleotide
cctcattaggcagttgtgaggaatg

SEQ ID NO: 3946 - DNA, 25 bp, Artificial Sequence
  Description of Artificial Sequence: Synthetic oligonucleotide
gaggggaggagaaagagcctagtgc

SEQ ID NO: 3947 - DNA, 27 bp, Artificial Sequence
  Description of Artificial Sequence: Synthetic oligonucleotide
tgctgaaagttttttgatcactcactc

SEQ ID NO: 3948 - DNA, 25 bp, Artificial Sequence
  Description of Artificial Sequence: Synthetic oligonucleotide
agaaaagaactttggttgtggtcac

SEQ ID NO: 3949 - DNA, 28 bp, Artificial Sequence
  Description of Artificial Sequence: Synthetic oligonucleotide
ccgtaatctgtattgctcattttggtcc

SEQ ID NO: 3950 - DNA, 23 bp, Artificial Sequence
  Description of Artificial Sequence: Synthetic oligonucleotide
tgatcctcccacagagcctgtac

SEQ ID NO: 3951 - DNA, 26 bp, Artificial Sequence
  Description of Artificial Sequence: Synthetic oligonucleotide
ccaaggtgctatctggtcctatagcg

SEQ ID NO: 3952 - DNA, 24 bp, Artificial Sequence
  Description of Artificial Sequence: Synthetic oligonucleotide
cgtgtgctctgctgttcctttaac

SEQ ID NO: 3953 - DNA, 20 bp, Artificial Sequence
  Description of Artificial Sequence: Synthetic oligonucleotide
gggctgtcacggagcgactg

SEQ ID NO: 3954 - DNA, 26 bp, Artificial Sequence
  Description of Artificial Sequence: Synthetic oligonucleotide
tcttgacctaacatttccatgtctgg

SEQ ID NO: 3955 - DNA, 22 bp, Artificial Sequence
  Description of Artificial Sequence: Synthetic oligonucleotide
tacagccctatggggatggggc

SEQ ID NO: 3956 - DNA, 19 bp, Artificial Sequence
  Description of Artificial Sequence: Synthetic oligonucleotide
gcgcgcagaatgcaaagcg

SEQ ID NO: 3957 - DNA, 28 bp, Artificial Sequence
  Description of Artificial Sequence: Synthetic oligonucleotide
tgaaattgaaaagttgaggcattttttc

SEQ ID NO: 3958 - DNA, 28 bp, Artificial Sequence
  Description of Artificial Sequence: Synthetic oligonucleotide
cagacaggtttctcctgaaactctttcg

SEQ ID NO: 3959 - DNA, 22 bp, Artificial Sequence
  Description of Artificial Sequence: Synthetic oligonucleotide
ccgtccatcggcttctcatttc

SEQ ID NO: 3960 - DNA, 27 bp, Artificial Sequence
  Description of Artificial Sequence: Synthetic oligonucleotide
tctagaatattgcttcaaaaatgccag

SEQ ID NO: 3961 - DNA, 24 bp, Artificial Sequence
  Description of Artificial Sequence: Synthetic oligonucleotide
taagcatggtcaattcccccttcc

SEQ ID NO: 3962 - DNA, 28 bp, Artificial Sequence
  Description of Artificial Sequence: Synthetic oligonucleotide
catcccaaacccttaattatatgcatcc

SEQ ID NO: 3963 - DNA, 27 bp, Artificial Sequence
  Description of Artificial Sequence: Synthetic oligonucleotide
cagcccttagcaaccactaatctgttt

SEQ ID NO: 3964 - DNA, 28 bp, Artificial Sequence
  Description of Artificial Sequence: Synthetic oligonucleotide
catgattaggtcttttcaacactgcatg

SEQ ID NO: 3965 - DNA, 22 bp, Artificial Sequence
  Description of Artificial Sequence: Synthetic oligonucleotide
gatacgggtgggagctgcaacg

SEQ ID NO: 3966 - DNA, 20 bp, Artificial Sequence
  Description of Artificial Sequence: Synthetic oligonucleotide
cgcaggttcttggggcagac

SEQ ID NO: 3967 - DNA, 23 bp, Artificial Sequence
  Description of Artificial Sequence: Synthetic oligonucleotide
tgtcagagggacacaggagtcag

SEQ ID NO: 3968 - DNA, 26 bp, Artificial Sequence
  Description of Artificial Sequence: Synthetic oligonucleotide
aaacaagcagtgttttccacaaaaac

SEQ ID NO: 3969 - DNA, 23 bp, Artificial Sequence
  Description of Artificial Sequence: Synthetic oligonucleotide
gtaacccagactgtggcaaccac

SEQ ID NO: 3970 - DNA, 23 bp, Artificial Sequence
  Description of Artificial Sequence: Synthetic oligonucleotide
ccaggtttgagggagtgagtgcg

SEQ ID NO: 3971 - DNA, 27 bp, Artificial Sequence
  Description of Artificial Sequence: Synthetic oligonucleotide
ccctatcacctttgccttattccattc

SEQ ID NO: 3972 - DNA, 23 bp, Artificial Sequence
  Description of Artificial Sequence: Synthetic oligonucleotide
ggaaatgcaacatttggacaggg

SEQ ID NO: 3973 - DNA, 28 bp, Artificial Sequence
  Description of Artificial Sequence: Synthetic oligonucleotide
ggaaagtttcaacaataggatccaacag

SEQ ID NO: 3974 - DNA, 24 bp, Artificial Sequence
  Description of Artificial Sequence: Synthetic oligonucleotide
agagaagcacaagacaagaggccg

SEQ ID NO: 3975 - DNA, 23 bp, Artificial Sequence
  Description of Artificial Sequence: Synthetic oligonucleotide
tgagagtctagggaggcccacag

SEQ ID NO: 3976 - DNA, 28 bp, Artificial Sequence
  Description of Artificial Sequence: Synthetic oligonucleotide
caaaaagcaacattcaagataacccatg

SEQ ID NO: 3977 - DNA, 26 bp, Artificial Sequence
  Description of Artificial Sequence: Synthetic oligonucleotide
tctgtccatatttcattctccatcag

SEQ ID NO: 3978 - DNA, 26 bp, Artificial Sequence
  Description of Artificial Sequence: Synthetic oligonucleotide
ggaagccctgaattttgtctctgtcc

SEQ ID NO: 3979 - DNA, 26 bp, Artificial Sequence
  Description of Artificial Sequence: Synthetic oligonucleotide
actcccttcttctcaagagatttccg

SEQ ID NO: 3980 - DNA, 25 bp, Artificial Sequence
  Description of Artificial Sequence: Synthetic oligonucleotide
tgactttaattcattcctgggcatc

SEQ ID NO: 3981 - DNA, 24 bp, Artificial Sequence
  Description of Artificial Sequence: Synthetic oligonucleotide
tcttggcgtctgtggtgaataatg

SEQ ID NO: 3982 - DNA, 24 bp, Artificial Sequence
  Description of Artificial Sequence: Synthetic oligonucleotide
gcaaagctcctgagtggaattccc

SEQ ID NO: 3983 - DNA, 24 bp, Artificial Sequence
  Description of Artificial Sequence: Synthetic oligonucleotide
ccagtgaggaaagatcccaccttc

SEQ ID NO: 3984 - DNA, 23 bp, Artificial Sequence
  Description of Artificial Sequence: Synthetic oligonucleotide
cagcacttgggattggggttaag

SEQ ID NO: 3985 - DNA, 20 bp, Artificial Sequence
  Description of Artificial Sequence: Synthetic oligonucleotide
gaggccaggagggctggacg

SEQ ID NO: 3986 - DNA, 24 bp, Artificial Sequence
  Description of Artificial Sequence: Synthetic oligonucleotide
gaacctgaattctgccaacaaccc

SEQ ID NO: 3987 - DNA, 24 bp, Artificial Sequence
  Description of Artificial Sequence: Synthetic oligonucleotide
ataatgacatgagcgagcgccaac

SEQ ID NO: 3988 - DNA, 22 bp, Artificial Sequence
  Description of Artificial Sequence: Synthetic oligonucleotide
accccgtctgctctaccccatc

SEQ ID NO: 3989 - DNA, 24 bp, Artificial Sequence
  Description of Artificial Sequence: Synthetic oligonucleotide
aggcaggaggagaagcaagttgtg

SEQ ID NO: 3990 - DNA, 24 bp, Artificial Sequence
  Description of Artificial Sequence: Synthetic oligonucleotide
gagctctcatgagaaagcccaacc

SEQ ID NO: 3991 - DNA, 28 bp, Artificial Sequence
  Description of Artificial Sequence: Synthetic oligonucleotide
gaatcttgcaccttaaactcacacatcc

SEQ ID NO: 3992 - DNA, 26 bp, Artificial Sequence
  Description of Artificial Sequence: Synthetic oligonucleotide
ttagtatggccactagggaaaacatg

SEQ ID NO: 3993 - DNA, 24 bp, Artificial Sequence
  Description of Artificial Sequence: Synthetic oligonucleotide
gaggagaggaggatgcacagatgg

SEQ ID NO: 3994 - DNA, 28 bp, Artificial Sequence
  Description of Artificial Sequence: Synthetic oligonucleotide
gggtcacaattatttaggcaaatcactg

SEQ ID NO: 3995 - DNA, 24 bp, Artificial Sequence
  Description of Artificial Sequence: Synthetic oligonucleotide
tcatttgaaaccgtccagatcaac

SEQ ID NO: 3996 - DNA, 28 bp, Artificial Sequence
  Description of Artificial Sequence: Synthetic oligonucleotide
tgctggacttgcactaatttgtacagtc

SEQ ID NO: 3997 - DNA, 28 bp, Artificial Sequence
  Description of Artificial Sequence: Synthetic oligonucleotide
tgttattctcgtgtgatgagaatctcag

SEQ ID NO: 3998 - DNA, 25 bp, Artificial Sequence
  Description of Artificial Sequence: Synthetic oligonucleotide
ttgggacttgtgaggtatcactcac

SEQ ID NO: 3999 - DNA, 26 bp, Artificial Sequence
  Description of Artificial Sequence: Synthetic oligonucleotide
aactccaccacaaaacatactgcatc

SEQ ID NO: 4000 - DNA, 27 bp, Artificial Sequence
  Description of Artificial Sequence: Synthetic oligonucleotide
ccataaaactgcctgtgaaagtaaaag

SEQ ID NO: 4001 - DNA, 24 bp, Artificial Sequence
  Description of Artificial Sequence: Synthetic oligonucleotide
tcctgcttcatccagccagaatac

SEQ ID NO: 4002 - DNA, 28 bp, Artificial Sequence
  Description of Artificial Sequence: Synthetic oligonucleotide
tggtccatagattcatttctcactcacc

SEQ ID NO: 4003 - DNA, 23 bp, Artificial Sequence
  Description of Artificial Sequence: Synthetic oligonucleotide
tgtgtcatcttctcatgggccag

SEQ ID NO: 4004 - DNA, 23 bp, Artificial Sequence
  Description of Artificial Sequence: Synthetic oligonucleotide
agtgtctcatggagaggcccttg

SEQ ID NO: 4005 - DNA, 22 bp, Artificial Sequence
  Description of Artificial Sequence: Synthetic oligonucleotide
ggcggggccttccagttattat

SEQ ID NO: 4006 - DNA, 23 bp, Artificial Sequence
  Description of Artificial Sequence: Synthetic oligonucleotide
cctcctcctgcagctttgcatac

SEQ ID NO: 4007 - DNA, 25 bp, Artificial Sequence
  Description of Artificial Sequence: Synthetic oligonucleotide
gcactgtcctactcagcagcgaatg

SEQ ID NO: 4008 - DNA, 27 bp, Artificial Sequence
  Description of Artificial Sequence: Synthetic oligonucleotide
ggaaaaatctactggcaatggaatctg

SEQ ID NO: 4009 - DNA, 27 bp, Artificial Sequence
  Description of Artificial Sequence: Synthetic oligonucleotide
gcaagcaggtaatgggaaagtttttag

SEQ ID NO: 4010 - DNA, 21 bp, Artificial Sequence
  Description of Artificial Sequence: Synthetic oligonucleotide
cccactcatggccacagcttc

SEQ ID NO: 4011 - DNA, 23 bp, Artificial Sequence
  Description of Artificial Sequence: Synthetic oligonucleotide
ggggaaccacagtttcaccatcg

SEQ ID NO: 4012 - DNA, 22 bp, Artificial Sequence
  Description of Artificial Sequence: Synthetic oligonucleotide
ttcagctccttgaggctgtggg

SEQ ID NO: 4013 - DNA, 21 bp, Artificial Sequence
  Description of Artificial Sequence: Synthetic oligonucleotide
gtggatcccactgtcaccccg

SEQ ID NO: 4014 - DNA, 26 bp, Artificial Sequence
  Description of Artificial Sequence: Synthetic oligonucleotide
cacctaaactgagtcaagctggctag

SEQ ID NO: 4015 - DNA, 24 bp, Artificial Sequence
  Description of Artificial Sequence: Synthetic oligonucleotide
cgtgatgttcactgtctgccaagg

SEQ ID NO: 4016 - DNA, 23 bp, Artificial Sequence
  Description of Artificial Sequence: Synthetic oligonucleotide
gctggaagtcatcgtcagcaaac

SEQ ID NO: 4017 - DNA, 23 bp, Artificial Sequence
  Description of Artificial Sequence: Synthetic oligonucleotide
gatcatctcccctgctggaaacc

SEQ ID NO: 4018 - DNA, 23 bp, Artificial Sequence
  Description of Artificial Sequence: Synthetic oligonucleotide
tccatgtcgcccacactttaaac

SEQ ID NO: 4019 - DNA, 22 bp, Artificial Sequence
  Description of Artificial Sequence: Synthetic oligonucleotide
ggagaaggtccctccaggagac

SEQ ID NO: 4020 - DNA, 27 bp, Artificial Sequence
  Description of Artificial Sequence: Synthetic oligonucleotide
catgagacggttattttgagaaccacg

SEQ ID NO: 4021 - DNA, 28 bp, Artificial Sequence
  Description of Artificial Sequence: Synthetic oligonucleotide
gcttttacaccattgaaaagtcaaaaat

SEQ ID NO: 4022 - DNA, 27 bp, Artificial Sequence
  Description of Artificial Sequence: Synthetic oligonucleotide
tgacaataatttgtttggctagggtag

SEQ ID NO: 4023 - DNA, 27 bp, Artificial Sequence
  Description of Artificial Sequence: Synthetic oligonucleotide
aaacacagtgaaagaaacaggaaagag

SEQ ID NO: 4024 - DNA, 21 bp, Artificial Sequence
  Description of Artificial Sequence: Synthetic oligonucleotide
cagggctgggggtgtgtgtac

SEQ ID NO: 4025 - DNA, 26 bp, Artificial Sequence
  Description of Artificial Sequence: Synthetic oligonucleotide
gagagtgggtgtagccttcagatgtc

SEQ ID NO: 4026 - DNA, 19 bp, Artificial Sequence
  Description of Artificial Sequence: Synthetic oligonucleotide
ctcctgccgaacttcgccg

SEQ ID NO: 4027 - DNA, 28 bp, Artificial Sequence
  Description of Artificial Sequence: Synthetic oligonucleotide
gctaagtacttccaggaaactcattcaa

SEQ ID NO: 4028 - DNA, 23 bp, Artificial Sequence
  Description of Artificial Sequence: Synthetic oligonucleotide
acctagctcttcctgggagggtg

SEQ ID NO: 4029 - DNA, 24 bp, Artificial Sequence
  Description of Artificial Sequence: Synthetic oligonucleotide
agtcacctggccagaagggatacc

SEQ ID NO: 4030 - DNA, 24 bp, Artificial Sequence
  Description of Artificial Sequence: Synthetic oligonucleotide
gggatggggaaagagaatgtgacc

SEQ ID NO: 4031 - DNA, 28 bp, Artificial Sequence
  Description of Artificial Sequence: Synthetic oligonucleotide
gaaatgtctgcaatatctagattgggag

SEQ ID NO: 4032 - DNA, 28 bp, Artificial Sequence
  Description of Artificial Sequence: Synthetic oligonucleotide
gagagtgatgatggctacataacattgc

SEQ ID NO: 4033 - DNA, 22 bp, Artificial Sequence
  Description of Artificial Sequence: Synthetic oligonucleotide
accagccctcctctgtgggacg

SEQ ID NO: 4034 - DNA, 20 bp, Artificial Sequence
  Description of Artificial Sequence: Synthetic oligonucleotide
ggatgttgtgcgctgagggc

SEQ ID NO: 4035 - DNA, 23 bp, Artificial Sequence
  Description of Artificial Sequence: Synthetic oligonucleotide
aggaaagcggaatgaaagcaggc

SEQ ID NO: 4036 - DNA, 20 bp, Artificial Sequence
  Description of Artificial Sequence: Synthetic oligonucleotide
cccaggcccaacttaccccg

SEQ ID NO: 4037 - DNA, 28 bp, Artificial Sequence
  Description of Artificial Sequence: Synthetic oligonucleotide
tcttcacatcctgaagttggtactcttg

SEQ ID NO: 4038 - DNA, 22 bp, Artificial Sequence
  Description of Artificial Sequence: Synthetic oligonucleotide
aaaccaagggcaggatcaggag

SEQ ID NO: 4039 - DNA, 26 bp, Artificial Sequence
  Description of Artificial Sequence: Synthetic oligonucleotide
ttttaattccaggaaataaatgcccg

SEQ ID NO: 4040 - DNA, 28 bp, Artificial Sequence
  Description of Artificial Sequence: Synthetic oligonucleotide
agaagagtagagtgggcccttatgtacc

SEQ ID NO: 4041 - DNA, 27 bp, Artificial Sequence
  Description of Artificial Sequence: Synthetic oligonucleotide
tggaaattaaatttttagccactcaac

SEQ ID NO: 4042 - DNA, 20 bp, Artificial Sequence
  Description of Artificial Sequence: Synthetic oligonucleotide
cagtggctcgtctccacccc

SEQ ID NO: 4043 - DNA, 25 bp, Artificial Sequence
  Description of Artificial Sequence: Synthetic oligonucleotide
tgaaaccatcaaggcaatgtgatag

SEQ ID NO: 4044 - DNA, 27 bp, Artificial Sequence
  Description of Artificial Sequence: Synthetic oligonucleotide
ggtggtgggttttaatgaacattttcg

SEQ ID NO: 4045 - DNA, 27 bp, Artificial Sequence
  Description of Artificial Sequence: Synthetic oligonucleotide
acatatcgttttaccacaatttcaccg

SEQ ID NO: 4046 - DNA, 21 bp, Artificial Sequence
  Description of Artificial Sequence: Synthetic oligonucleotide
cctgctgcctccccaaactcc

SEQ ID NO: 4047 - DNA, 22 bp, Artificial Sequence
  Description of Artificial Sequence: Synthetic oligonucleotide
ggggtacatatgggagcctggg

SEQ ID NO: 4048 - DNA, 27 bp, Artificial Sequence
  Description of Artificial Sequence: Synthetic oligonucleotide
acatgcacagtatttgaaatctgtgtg

SEQ ID NO: 4049 - DNA, 21 bp, Artificial Sequence
  Description of Artificial Sequence: Synthetic oligonucleotide
ccagctccatcccgtcaatgc

SEQ ID NO: 4050 - DNA, 20 bp, Artificial Sequence
  Description of Artificial Sequence: Synthetic oligonucleotide
gccctgatggccactgagcc

SEQ ID NO: 4051 - DNA, 27 bp, Artificial Sequence
  Description of Artificial Sequence: Synthetic oligonucleotide
gtttggatacaaaggacaggagactac

SEQ ID NO: 4052 - DNA, 28 bp, Artificial Sequence
  Description of Artificial Sequence: Synthetic oligonucleotide
gaactttatgaaattattcctgcctcag

SEQ ID NO: 4053 - DNA, 24 bp, Artificial Sequence
  Description of Artificial Sequence: Synthetic oligonucleotide
aattcaggcactttgcattcctcg

SEQ ID NO: 4054 - DNA, 24 bp, Artificial Sequence
  Description of Artificial Sequence: Synthetic oligonucleotide
tggctttacaaggaatgggcagtg

SEQ ID NO: 4055 - DNA, 23 bp, Artificial Sequence
  Description of Artificial Sequence: Synthetic oligonucleotide
gagtccaggttgactgatggggg

SEQ ID NO: 4056 - DNA, 27 bp, Artificial Sequence
  Description of Artificial Sequence: Synthetic oligonucleotide
agtaggaaggaatctatgtcggactcg

SEQ ID NO: 4057 - DNA, 24 bp, Artificial Sequence
  Description of Artificial Sequence: Synthetic oligonucleotide
ctaggggccagcagtttaggagtg

SEQ ID NO: 4058 - DNA, 23 bp, Artificial Sequence
  Description of Artificial Sequence: Synthetic oligonucleotide
tggggttgaaaagaggagacccg

SEQ ID NO: 4059 - DNA, 18 bp, Artificial Sequence
  Description of Artificial Sequence: Synthetic oligonucleotide
cctgccaattgcctgcgc

SEQ ID NO: 4060 - DNA, 28 bp, Artificial Sequence
  Description of Artificial Sequence: Synthetic oligonucleotide
tcattatccccagttcaatgactttaac

SEQ ID NO: 4061 - DNA, 29 bp, Artificial Sequence
  Description of Artificial Sequence: Synthetic oligonucleotide
tggtcaggatataaaatggtacaactgcg

SEQ ID NO: 4062 - DNA, 22 bp, Artificial Sequence
  Description of Artificial Sequence: Synthetic oligonucleotide
attcctgtgaacccccagtccc

SEQ ID NO: 4063 - DNA, 22 bp, Artificial Sequence
  Description of Artificial Sequence: Synthetic oligonucleotide
cccgctcctgagtatctccccc

SEQ ID NO: 4064 - DNA, 24 bp, Artificial Sequence
  Description of Artificial Sequence: Synthetic oligonucleotide
aaccctgtgatcttcaatgagccc

SEQ ID NO: 4065 - DNA, 23 bp, Artificial Sequence
  Description of Artificial Sequence: Synthetic oligonucleotide
cctctctttccctcctccccacc

SEQ ID NO: 4066 - DNA, 20 bp, Artificial Sequence
  Description of Artificial Sequence: Synthetic oligonucleotide
atggcaggaagggtgggggg

SEQ ID NO: 4067 - DNA, 28 bp, Artificial Sequence
  Description of Artificial Sequence: Synthetic oligonucleotide
ccggtaagaatttagcaagtgatgaaac

SEQ ID NO: 4068 - DNA, 20 bp, Artificial Sequence
  Description of Artificial Sequence: Synthetic oligonucleotide
cttgtccctccccacccccg

SEQ ID NO: 4069 - DNA, 29 bp, Artificial Sequence
  Description of Artificial Sequence: Synthetic oligonucleotide
cctcctccactgttatgtgtaactatcag

SEQ ID NO: 4070 - DNA, 21 bp, Artificial Sequence
  Description of Artificial Sequence: Synthetic oligonucleotide
cgggacaaatccacacccatg

SEQ ID NO: 4071 - DNA, 23 bp, Artificial Sequence
  Description of Artificial Sequence: Synthetic oligonucleotide
gagcaagtggtttgtccaaggcc

SEQ ID NO: 4072 - DNA, 20 bp, Artificial Sequence
  Description of Artificial Sequence: Synthetic oligonucleotide
aggcggtgtctggggttggg

SEQ ID NO: 4073 - DNA, 23 bp, Artificial Sequence
  Description of Artificial Sequence: Synthetic oligonucleotide
agcacctgcaagaaaaagggtgg

SEQ ID NO: 4074 - DNA, 19 bp, Artificial Sequence
  Description of Artificial Sequence: Synthetic oligonucleotide
ccatatgaggctgccggcg

SEQ ID NO: 4075 - DNA, 22 bp, Artificial Sequence
  Description of Artificial Sequence: Synthetic oligonucleotide
actcatcctggaggcagctgcc

SEQ ID NO: 4076 - DNA, 23 bp, Artificial Sequence
  Description of Artificial Sequence: Synthetic oligonucleotide
ccaccaccctctcactcctgaac

SEQ ID NO: 4077 - DNA, 24 bp, Artificial Sequence
  Description of Artificial Sequence: Synthetic oligonucleotide
ccccagtccaaagtgttttctgcc

SEQ ID NO: 4078 - DNA, 22 bp, Artificial Sequence
  Description of Artificial Sequence: Synthetic oligonucleotide
aggacccacacctgctttcctc

SEQ ID NO: 4079 - DNA, 21 bp, Artificial Sequence
  Description of Artificial Sequence: Synthetic oligonucleotide
acacagcagagctgcctgcac

SEQ ID NO: 4080 - DNA, 29 bp, Artificial Sequence
  Description of Artificial Sequence: Synthetic oligonucleotide
gggaaatgcaacagagaattaaataaagc

SEQ ID NO: 4081 - DNA, 22 bp, Artificial Sequence
  Description of Artificial Sequence: Synthetic oligonucleotide
gagcatcaaactctggggggag

SEQ ID NO: 4082 - DNA, 22 bp, Artificial Sequence
  Description of Artificial Sequence: Synthetic oligonucleotide
ggcaaacagcacaccagaacct

SEQ ID NO: 4083 - DNA, 22 bp, Artificial Sequence
  Description of Artificial Sequence: Synthetic oligonucleotide
acctgctcctcccacctgatcg

SEQ ID NO: 4084 - DNA, 25 bp, Artificial Sequence
  Description of Artificial Sequence: Synthetic oligonucleotide
gaaaacaaaggccgcagattaaaac

SEQ ID NO: 4085 - DNA, 28 bp, Artificial Sequence
  Description of Artificial Sequence: Synthetic oligonucleotide
gaatgttgtttagccaacttctctgtac

SEQ ID NO: 4086 - DNA, 29 bp, Artificial Sequence
  Description of Artificial Sequence: Synthetic oligonucleotide
ccaatctctgttactctcacgtaatcctg

SEQ ID NO: 4087 - DNA, 24 bp, Artificial Sequence
  Description of Artificial Sequence: Synthetic oligonucleotide
tggtgatgtcaaatggtgacgagc

SEQ ID NO: 4088 - DNA, 22 bp, Artificial Sequence
  Description of Artificial Sequence: Synthetic oligonucleotide
ggggcttcctctccttcgactc

SEQ ID NO: 4089 - DNA, 22 bp, Artificial Sequence
  Description of Artificial Sequence: Synthetic oligonucleotide
cagcagctccagttcccaatcc

SEQ ID NO: 4090 - DNA, 23 bp, Artificial Sequence
  Description of Artificial Sequence: Synthetic oligonucleotide
gccataaattcttgcacctgggc

SEQ ID NO: 4091 - DNA, 28 bp, Artificial Sequence
  Description of Artificial Sequence: Synthetic oligonucleotide
tcatatgagaatgtctctgttctgtcag

SEQ ID NO: 4092 - DNA, 22 bp, Artificial Sequence
  Description of Artificial Sequence: Synthetic oligonucleotide
gatggaaacctggtcccaacac

SEQ ID NO: 4093 - DNA, 23 bp, Artificial Sequence
  Description of Artificial Sequence: Synthetic oligonucleotide
gttagggcttcactggccacatc

SEQ ID NO: 4094 - DNA, 25 bp, Artificial Sequence
  Description of Artificial Sequence: Synthetic oligonucleotide
tatcaatcatcctcccaccctcccc

SEQ ID NO: 4095 - DNA, 20 bp, Artificial Sequence
  Description of Artificial Sequence: Synthetic oligonucleotide
catgcacccagcacaatggg

SEQ ID NO: 4096 - DNA, 28 bp, Artificial Sequence
  Description of Artificial Sequence: Synthetic oligonucleotide
gatggactgtttcctggctctatatacc

SEQ ID NO: 4097 - DNA, 22 bp, Artificial Sequence
  Description of Artificial Sequence: Synthetic oligonucleotide
tccaatcacctcccatgaggtc

SEQ ID NO: 4098 - DNA, 27 bp, Artificial Sequence
  Description of Artificial Sequence: Synthetic oligonucleotide
aaaattttgtttcttgtccctttcttg

SEQ ID NO: 4099 - DNA, 20 bp, Artificial Sequence
  Description of Artificial Sequence: Synthetic oligonucleotide
agggccagagaccagctccg

SEQ ID NO: 4100 - DNA, 27 bp, Artificial Sequence
  Description of Artificial Sequence: Synthetic oligonucleotide
tgttaccaatggcagaatttccttctc

SEQ ID NO: 4101 - DNA, 22 bp, Artificial Sequence
  Description of Artificial Sequence: Synthetic oligonucleotide
gcagccctctgtgaccacaagc

SEQ ID NO: 4102 - DNA, 22 bp, Artificial Sequence
  Description of Artificial Sequence: Synthetic oligonucleotide
cgccctccaggatccaataggg

SEQ ID NO: 4103 - DNA, 28 bp, Artificial Sequence
  Description of Artificial Sequence: Synthetic oligonucleotide
gcaaccattgatactaattgcttaggtc

SEQ ID NO: 4104 - DNA, 26 bp, Artificial Sequence
  Description of Artificial Sequence: Synthetic oligonucleotide
tgggtctccttgttatcttctttcac

SEQ ID NO: 4105 - DNA, 23 bp, Artificial Sequence
  Description of Artificial Sequence: Synthetic oligonucleotide
ggaaggtcaatacctgagccgtc

SEQ ID NO: 4106 - DNA, 25 bp, Artificial Sequence
  Description of Artificial Sequence: Synthetic oligonucleotide
cctctgccttcttcacacccattac

SEQ ID NO: 4107 - DNA, 23 bp, Artificial Sequence
  Description of Artificial Sequence: Synthetic oligonucleotide
ctgacctaggtctgtctgccccg

SEQ ID NO: 4108 - DNA, 21 bp, Artificial Sequence
  Description of Artificial Sequence: Synthetic oligonucleotide
gccccgtggctaacagagctg

SEQ ID NO: 4109 - DNA, 21 bp, Artificial Sequence
  Description of Artificial Sequence: Synthetic oligonucleotide
agtgctggaggctgactggcg

SEQ ID NO: 4110 - DNA, 21 bp, Artificial Sequence
  Description of Artificial Sequence: Synthetic oligonucleotide
cggagtgcaagggtggaaacc

SEQ ID NO: 4111 - DNA, 20 bp, Artificial Sequence
  Description of Artificial Sequence: Synthetic oligonucleotide
ggtggagacgagccactggg

SEQ ID NO: 4112 - DNA, 23 bp, Artificial Sequence
  Description of Artificial Sequence: Synthetic oligonucleotide
tggggcccacaaggaattatctg

SEQ ID NO: 4113 - DNA, 22 bp, Artificial Sequence
  Description of Artificial Sequence: Synthetic oligonucleotide
atcaggtagtctgaggccgccc

SEQ ID NO: 4114 - DNA, 27 bp, Artificial Sequence
  Description of Artificial Sequence: Synthetic oligonucleotide
tttcttctgagttttcactagctgcag

SEQ ID NO: 4115 - DNA, 26 bp, Artificial Sequence
  Description of Artificial Sequence: Synthetic oligonucleotide
tgaaaacatctgacccttgagttttc

SEQ ID NO: 4116 - DNA, 21 bp, Artificial Sequence
  Description of Artificial Sequence: Synthetic oligonucleotide
gagttttggtggggacattcc

SEQ ID NO: 4117 - DNA, 23 bp, Artificial Sequence
  Description of Artificial Sequence: Synthetic oligonucleotide
cattgtgagtccattgcttgcag

SEQ ID NO: 4118 - DNA, 23 bp, Artificial Sequence
  Description of Artificial Sequence: Synthetic oligonucleotide
gagcctggagcaagtgcctaagc

SEQ ID NO: 4119 - DNA, 24 bp, Artificial Sequence
  Description of Artificial Sequence: Synthetic oligonucleotide
tccaccatggtctcaaaggctacg

SEQ ID NO: 4120 - DNA, 23 bp, Artificial Sequence
  Description of Artificial Sequence: Synthetic oligonucleotide
cttgtgtgcttgctgggatcatg

SEQ ID NO: 4121 - DNA, 19 bp, Artificial Sequence
  Description of Artificial Sequence: Synthetic oligonucleotide
ctgccaaggcagggtggcc

SEQ ID NO: 4122 - DNA, 23 bp, Artificial Sequence
  Description of Artificial Sequence: Synthetic oligonucleotide
ttcctctaaggcccagtcaccag

SEQ ID NO: 4123 - DNA, 30 bp, Artificial Sequence
  Description of Artificial Sequence: Synthetic oligonucleotide
ggaaagctataggctaatctcactgacaag

SEQ ID NO: 4124 - DNA, 24 bp, Artificial Sequence
  Description of Artificial Sequence: Synthetic oligonucleotide
gctttggttgccaccactaactcg

SEQ ID NO: 4125 - DNA, 22 bp, Artificial Sequence
  Description of Artificial Sequence: Synthetic oligonucleotide
cagccctatagccaccccaagt

SEQ ID NO: 4126 - DNA, 22 bp, Artificial Sequence
  Description of Artificial Sequence: Synthetic oligonucleotide
aacccaagggctattcctgcac

SEQ ID NO: 4127 - DNA, 22 bp, Artificial Sequence
  Description of Artificial Sequence: Synthetic oligonucleotide
tttggacttcggacacctccac

SEQ ID NO: 4128 - DNA, 22 bp, Artificial Sequence
  Description of Artificial Sequence: Synthetic oligonucleotide
accctcaaaccccagctgactg

SEQ ID NO: 4129 - DNA, 24 bp, Artificial Sequence
  Description of Artificial Sequence: Synthetic oligonucleotide
taagaggcaaggatgaggctgagg

SEQ ID NO: 4130 - DNA, 22 bp, Artificial Sequence
  Description of Artificial Sequence: Synthetic oligonucleotide
gagggactagggtgtccccaat

SEQ ID NO: 4131 - DNA, 18 bp, Artificial Sequence
  Description of Artificial Sequence: Synthetic oligonucleotide
ccccaggacccctggcag

SEQ ID NO: 4132 - DNA, 23 bp, Artificial Sequence
  Description of Artificial Sequence: Synthetic oligonucleotide
agcggagtgtaaggccaagtgag

SEQ ID NO: 4133 - DNA, 23 bp, Artificial Sequence
  Description of Artificial Sequence: Synthetic oligonucleotide
cagaggaggagcccaacagaatc

SEQ ID NO: 4134 - DNA, 21 bp, Artificial Sequence
  Description of Artificial Sequence: Synthetic oligonucleotide
tttcaccatgggtcagcccag

SEQ ID NO: 4135 - DNA, 21 bp, Artificial Sequence
  Description of Artificial Sequence: Synthetic oligonucleotide
tggaaagcaagcacatatgcg

SEQ ID NO: 4136 - DNA, 22 bp, Artificial Sequence
  Description of Artificial Sequence: Synthetic oligonucleotide
ccagggggaagagcaaaggacc

SEQ ID NO: 4137 - DNA, 23 bp, Artificial Sequence
  Description of Artificial Sequence: Synthetic oligonucleotide
ctgtgggtgcatttgatgtgacc

SEQ ID NO: 4138 - DNA, 29 bp, Artificial Sequence
  Description of Artificial Sequence: Synthetic oligonucleotide
cacttcagttgcaaaagtcctatttcttg

SEQ ID NO: 4139 - DNA, 20 bp, Artificial Sequence
  Description of Artificial Sequence: Synthetic oligonucleotide
cattccgccctgctaagccg

SEQ ID NO: 4140 - DNA, 23 bp, Artificial Sequence
  Description of Artificial Sequence: Synthetic oligonucleotide
ttctgggtccacacgatgttttc

SEQ ID NO: 4141 - DNA, 22 bp, Artificial Sequence
  Description of Artificial Sequence: Synthetic oligonucleotide
ggagcgacagaagcttctggac

SEQ ID NO: 4142 - DNA, 20 bp, Artificial Sequence
  Description of Artificial Sequence: Synthetic oligonucleotide
ggggagggaggacccaaagc

SEQ ID NO: 4143 - DNA, 24 bp, Artificial Sequence
  Description of Artificial Sequence: Synthetic oligonucleotide
tcagcctttccatctttgctgtcg

SEQ ID NO: 4144 - DNA, 23 bp, Artificial Sequence
  Description of Artificial Sequence: Synthetic oligonucleotide
taaaaaagaaaggcaggtccggg

SEQ ID NO: 4145 - DNA, 23 bp, Artificial Sequence
  Description of Artificial Sequence: Synthetic oligonucleotide
tcataaaggcatgaggtgggacg

SEQ ID NO: 4146 - DNA, 22 bp, Artificial Sequence
  Description of Artificial Sequence: Synthetic oligonucleotide
gcctccactcaggtcagaaccg

SEQ ID NO: 4147 - DNA, 28 bp, Artificial Sequence
  Description of Artificial Sequence: Synthetic oligonucleotide
accatagtaggaaacctggatagagacg

SEQ ID NO: 4148 - DNA, 24 bp, Artificial Sequence
  Description of Artificial Sequence: Synthetic oligonucleotide
ctatggactgaattgtgtcccccc

SEQ ID NO: 4149 - DNA, 19 bp, Artificial Sequence
  Description of Artificial Sequence: Synthetic oligonucleotide
agggagggggtgggacagg

SEQ ID NO: 4150 - DNA, 23 bp, Artificial Sequence
  Description of Artificial Sequence: Synthetic oligonucleotide
ctttggggtagctccctctcagg

SEQ ID NO: 4151 - DNA, 18 bp, Artificial Sequence
  Description of Artificial Sequence: Synthetic oligonucleotide
gaggccagctggggcaac

SEQ ID NO: 4152 - DNA, 22 bp, Artificial Sequence
  Description of Artificial Sequence: Synthetic oligonucleotide
cggttcctctccaaacctggtc

SEQ ID NO: 4153 - DNA, 29 bp, Artificial Sequence
  Description of Artificial Sequence: Synthetic oligonucleotide
gctgtaagtcactaaatttgggggtagtg

SEQ ID NO: 4154 - DNA, 27 bp, Artificial Sequence
  Description of Artificial Sequence: Synthetic oligonucleotide
gaatattctccaatcttgaaaatggcc

SEQ ID NO: 4155 - DNA, 29 bp, Artificial Sequence
  Description of Artificial Sequence: Synthetic oligonucleotide
ggggcatcaataattaatgcttatttatc

SEQ ID NO: 4156 - DNA, 26 bp, Artificial Sequence
  Description of Artificial Sequence: Synthetic oligonucleotide
aattctcaggggaaattttttacccc

SEQ ID NO: 4157 - DNA, 24 bp, Artificial Sequence
  Description of Artificial Sequence: Synthetic oligonucleotide
gttactcatcccagaagcacccac

SEQ ID NO: 4158 - DNA, 21 bp, Artificial Sequence
  Description of Artificial Sequence: Synthetic oligonucleotide
gtagaggcagagggggctggg

SEQ ID NO: 4159 - DNA, 21 bp, Artificial Sequence
  Description of Artificial Sequence: Synthetic oligonucleotide
aacagaatccaaaggccggcg

SEQ ID NO: 4160 - DNA, 20 bp, Artificial Sequence
  Description of Artificial Sequence: Synthetic oligonucleotide
ggccccctctcgtttgaggg

SEQ ID NO: 4161 - DNA, 23 bp, Artificial Sequence
  Description of Artificial Sequence: Synthetic oligonucleotide
tgattgcctgtccagctgttgag

SEQ ID NO: 4162 - DNA, 23 bp, Artificial Sequence
  Description of Artificial Sequence: Synthetic oligonucleotide
actgcgctaaggaggcaactgtg

SEQ ID NO: 4163 - DNA, 24 bp, Artificial Sequence
  Description of Artificial Sequence: Synthetic oligonucleotide
ggaaaatgggaccaacgctaaaac

SEQ ID NO: 4164 - DNA, 22 bp, Artificial Sequence
  Description of Artificial Sequence: Synthetic oligonucleotide
gcactcctttcccaccgttttc

SEQ ID NO: 4165 - DNA, 28 bp, Artificial Sequence
  Description of Artificial Sequence: Synthetic oligonucleotide
cagtgacaaaacaggaagaacaaaaaac

SEQ ID NO: 4166 - DNA, 28 bp, Artificial Sequence
  Description of Artificial Sequence: Synthetic oligonucleotide
tcttcatgctatttattactgtctgcag

SEQ ID NO: 4167 - DNA, 22 bp, Artificial Sequence
  Description of Artificial Sequence: Synthetic oligonucleotide
gtgagtggtgggcacaggacag

SEQ ID NO: 4168 - DNA, 25 bp, Artificial Sequence
  Description of Artificial Sequence: Synthetic oligonucleotide
cagggaaagctgagtcatgattctg

SEQ ID NO: 4169 - DNA, 25 bp, Artificial Sequence
  Description of Artificial Sequence: Synthetic oligonucleotide
aacctttggaggaatggtcagactg

SEQ ID NO: 4170 - DNA, 28 bp, Artificial Sequence
  Description of Artificial Sequence: Synthetic oligonucleotide
gcagctactggaatgaattagagtttac

SEQ ID NO: 4171 - DNA, 24 bp, Artificial Sequence
  Description of Artificial Sequence: Synthetic oligonucleotide
ttctgccaaaatgaagccaacatg

SEQ ID NO: 4172 - DNA, 21 bp, Artificial Sequence
  Description of Artificial Sequence: Synthetic oligonucleotide
gtgaccagggccctgaactcg

SEQ ID NO: 4173 - DNA, 21 bp, Artificial Sequence
  Description of Artificial Sequence: Synthetic oligonucleotide
agcacagtccccaggcctcac

SEQ ID NO: 4174 - DNA, 30 bp, Artificial Sequence
  Description of Artificial Sequence: Synthetic oligonucleotide
tccttcttgctgagtaatgttctagttttg

SEQ ID NO: 4175 - DNA, 23 bp, Artificial Sequence
  Description of Artificial Sequence: Synthetic oligonucleotide
tgttctgctcctgcagaggtcac

SEQ ID NO: 4176 - DNA, 22 bp, Artificial Sequence
  Description of Artificial Sequence: Synthetic oligonucleotide
ggcttactttccccacggagcc

SEQ ID NO: 4177 - DNA, 23 bp, Artificial Sequence
  Description of Artificial Sequence: Synthetic oligonucleotide
cagaaagacgcagaggaggtggc

SEQ ID NO: 4178 - DNA, 22 bp, Artificial Sequence
  Description of Artificial Sequence: Synthetic oligonucleotide
ccaagggctcaccattgacagc

SEQ ID NO: 4179 - DNA, 21 bp, Artificial Sequence
  Description of Artificial Sequence: Synthetic oligonucleotide
gaaaatggggatggggtgaag

SEQ ID NO: 4180 - DNA, 21 bp, Artificial Sequence
  Description of Artificial Sequence: Synthetic oligonucleotide
ccttcatggccatagccacac

SEQ ID NO: 4181 - DNA, 20 bp, Artificial Sequence
  Description of Artificial Sequence: Synthetic oligonucleotide
gcctaccgagtgttggccag

SEQ ID NO: 4182 - DNA, 22 bp, Artificial Sequence
  Description of Artificial Sequence: Synthetic oligonucleotide
agctcaaggctcagggcctttg

SEQ ID NO: 4183 - DNA, 28 bp, Artificial Sequence
  Description of Artificial Sequence: Synthetic oligonucleotide
cacaatattcagtattttggcaggatat

SEQ ID NO: 4184 - DNA, 26 bp, Artificial Sequence
  Description of Artificial Sequence: Synthetic oligonucleotide
ttgagtgctatttctttgtggcatcg

SEQ ID NO: 4185 - DNA, 23 bp, Artificial Sequence
  Description of Artificial Sequence: Synthetic oligonucleotide
caggcaaggactgcagctagacg

SEQ ID NO: 4186 - DNA, 21 bp, Artificial Sequence
  Description of Artificial Sequence: Synthetic oligonucleotide
gggcaggatctggatgggacg

SEQ ID NO: 4187 - DNA, 25 bp, Artificial Sequence
  Description of Artificial Sequence: Synthetic oligonucleotide
gcttacagctcaggaatccaccaag

SEQ ID NO: 4188 - DNA, 23 bp, Artificial Sequence
  Description of Artificial Sequence: Synthetic oligonucleotide
accaggtgtgccctcatatgctc

SEQ ID NO: 4189 - DNA, 29 bp, Artificial Sequence
  Description of Artificial Sequence: Synthetic oligonucleotide
tgacattgcactgtaataataaaggtgtg

SEQ ID NO: 4190 - DNA, 22 bp, Artificial Sequence
  Description of Artificial Sequence: Synthetic oligonucleotide
aacctcatcccaccttggcaac

SEQ ID NO: 4191 - DNA, 27 bp, Artificial Sequence
  Description of Artificial Sequence: Synthetic oligonucleotide
ccttcaggactcacatcttagtcacac

SEQ ID NO: 4192 - DNA, 23 bp, Artificial Sequence
  Description of Artificial Sequence: Synthetic oligonucleotide
aggatagccctgctaggcaaggg

SEQ ID NO: 4193 - DNA, 23 bp, Artificial Sequence
  Description of Artificial Sequence: Synthetic oligonucleotide
agcctccctttcccaggcttatc

SEQ ID NO: 4194 - DNA, 25 bp, Artificial Sequence
  Description of Artificial Sequence: Synthetic oligonucleotide
aaatagctcagagaatgccaatggc

SEQ ID NO: 4195 - DNA, 18 bp, Artificial Sequence
  Description of Artificial Sequence: Synthetic oligonucleotide
cctccccccaccaaggac

SEQ ID NO: 4196 - DNA, 22 bp, Artificial Sequence
  Description of Artificial Sequence: Synthetic oligonucleotide
gggcgacttttcccccttaaag

SEQ ID NO: 4197 - DNA, 22 bp, Artificial Sequence
  Description of Artificial Sequence: Synthetic oligonucleotide
catcagccccaacaccagagac

SEQ ID NO: 4198 - DNA, 27 bp, Artificial Sequence
  Description of Artificial Sequence: Synthetic oligonucleotide
gtttttttcaaaaactggctatttgac

SEQ ID NO: 4199 - DNA, 20 bp, Artificial Sequence
  Description of Artificial Sequence: Synthetic oligonucleotide
gcagtgtcgacctcctgggg

SEQ ID NO: 4200 - DNA, 20 bp, Artificial Sequence
  Description of Artificial Sequence: Synthetic oligonucleotide
gacgcacgaacccctccctc

SEQ ID NO: 4201 - DNA, 30 bp, Artificial Sequence
  Description of Artificial Sequence: Synthetic oligonucleotide
gcaactgctatactacagtagtcaacctgg

SEQ ID NO: 4202 - DNA, 19 bp, Artificial Sequence
  Description of Artificial Sequence: Synthetic oligonucleotide
acccagggtcctcgccccc

SEQ ID NO: 4203 - DNA, 23 bp, Artificial Sequence
  Description of Artificial Sequence: Synthetic oligonucleotide
catagcacagggagggtttcccc

SEQ ID NO: 4204 - DNA, 29 bp, Artificial Sequence
  Description of Artificial Sequence: Synthetic oligonucleotide
ggcagaatcactctccaaaaagacttacc

SEQ ID NO: 4205 - DNA, 25 bp, Artificial Sequence
  Description of Artificial Sequence: Synthetic oligonucleotide
aagacgaggcaaagacacctagaac

SEQ ID NO: 4206 - DNA, 21 bp, Artificial Sequence
  Description of Artificial Sequence: Synthetic oligonucleotide
ctgccaggcaagctacagccc

SEQ ID NO: 4207 - DNA, 28 bp, Artificial Sequence
  Description of Artificial Sequence: Synthetic oligonucleotide
tgcaacgtagaaaggcttgattataaac

SEQ ID NO: 4208 - DNA, 22 bp, Artificial Sequence
  Description of Artificial Sequence: Synthetic oligonucleotide
caaagggctaggctcacacccc

SEQ ID NO: 4209 - DNA, 18 bp, Artificial Sequence
  Description of Artificial Sequence: Synthetic oligonucleotide
cgcggtaaggctggggtg

SEQ ID NO: 4210 - DNA, 30 bp, Artificial Sequence
  Description of Artificial Sequence: Synthetic oligonucleotide
cccaatatgcaattaacaaagaagataacg

SEQ ID NO: 4211 - DNA, 25 bp, Artificial Sequence
  Description of Artificial Sequence: Synthetic oligonucleotide
tccctgccccaatacctaaaaagtt

SEQ ID NO: 4212 - DNA, 18 bp, Artificial Sequence
  Description of Artificial Sequence: Synthetic oligonucleotide
ccccgcaccccacaggac

SEQ ID NO: 4213 - DNA, 21 bp, Artificial Sequence
  Description of Artificial Sequence: Synthetic oligonucleotide
ctgcctcgggagttctgaccg

SEQ ID NO: 4214 - DNA, 22 bp, Artificial Sequence
  Description of Artificial Sequence: Synthetic oligonucleotide
cgcacagattttccgagtgaac

SEQ ID NO: 4215 - DNA, 22 bp, Artificial Sequence
  Description of Artificial Sequence: Synthetic oligonucleotide
ggaggctcatccatcagctgcc

SEQ ID NO: 4216 - DNA, 24 bp, Artificial Sequence
  Description of Artificial Sequence: Synthetic oligonucleotide
cctcccatcctccaaaacttcctc

SEQ ID NO: 4217 - DNA, 26 bp, Artificial Sequence
  Description of Artificial Sequence: Synthetic oligonucleotide
ttgttggaaaattgcaagttgtatgg

SEQ ID NO: 4218 - DNA, 23 bp, Artificial Sequence
  Description of Artificial Sequence: Synthetic oligonucleotide
caccttcctcagagcccaccttc

SEQ ID NO: 4219 - DNA, 23 bp, Artificial Sequence
  Description of Artificial Sequence: Synthetic oligonucleotide
agtgctgaacatcacgtggctgc

SEQ ID NO: 4220 - DNA, 18 bp, Artificial Sequence
  Description of Artificial Sequence: Synthetic oligonucleotide
gcccccgcaaatcacccg

SEQ ID NO: 4221 - DNA, 21 bp, Artificial Sequence
  Description of Artificial Sequence: Synthetic oligonucleotide
agtccctgcctgtgtcccccc

SEQ ID NO: 4222 - DNA, 29 bp, Artificial Sequence
  Description of Artificial Sequence: Synthetic oligonucleotide
tttcttggatataacaccaaagatacaac

SEQ ID NO: 4223 - DNA, 22 bp, Artificial Sequence
  Description of Artificial Sequence: Synthetic oligonucleotide
gtcacccacaggtttcccaggc

SEQ ID NO: 4224 - DNA, 19 bp, Artificial Sequence
  Description of Artificial Sequence: Synthetic oligonucleotide
gggggccacaggaaaggcc

SEQ ID NO: 4225 - DNA, 22 bp, Artificial Sequence
  Description of Artificial Sequence: Synthetic oligonucleotide
ggctgggttgctggatgattcc

SEQ ID NO: 4226 - DNA, 21 bp, Artificial Sequence
  Description of Artificial Sequence: Synthetic oligonucleotide
cctccctgggcctcagtttcc

SEQ ID NO: 4227 - DNA, 19 bp, Artificial Sequence
  Description of Artificial Sequence: Synthetic oligonucleotide
gccttggcatgctccctcc

SEQ ID NO: 4228 - DNA, 19 bp, Artificial Sequence
  Description of Artificial Sequence: Synthetic oligonucleotide
cctcccagccacagctcgg

SEQ ID NO: 4229 - DNA, 20 bp, Artificial Sequence
  Description of Artificial Sequence: Synthetic oligonucleotide
ccctgccgctttctgtgacc

SEQ ID NO: 4230 - DNA, 27 bp, Artificial Sequence
  Description of Artificial Sequence: Synthetic oligonucleotide
ttcaaaatagttgacagctggtatggc

SEQ ID NO: 4231 - DNA, 19 bp, Artificial Sequence
  Description of Artificial Sequence: Synthetic oligonucleotide
gtgggcactggggggaaga

SEQ ID NO: 4232 - DNA, 30 bp, Artificial Sequence
  Description of Artificial Sequence: Synthetic oligonucleotide
ccataaagaagctctgtcaatttttagctg

SEQ ID NO: 4233 - DNA, 20 bp, Artificial Sequence
  Description of Artificial Sequence: Synthetic oligonucleotide
gaggaaaggcgctctggccg

SEQ ID NO: 4234 - DNA, 19 bp, Artificial Sequence
  Description of Artificial Sequence: Synthetic oligonucleotide
ctcctggtgggcgaccgtc

SEQ ID NO: 4235 - DNA, 28 bp, Artificial Sequence
  Description of Artificial Sequence: Synthetic oligonucleotide
tcagtgagcacatttacttccaagagta

SEQ ID NO: 4236 - DNA, 23 bp, Artificial Sequence
  Description of Artificial Sequence: Synthetic oligonucleotide
caaagccggttttgctcactgtc

SEQ ID NO: 4237 - DNA, 27 bp, Artificial Sequence
  Description of Artificial Sequence: Synthetic oligonucleotide
cctcttggtaaagtcagctgtaggaga

SEQ ID NO: 4238 - DNA, 22 bp, Artificial Sequence
  Description of Artificial Sequence: Synthetic oligonucleotide
gcggggtctgggttttcttgtc

SEQ ID NO: 4239 - DNA, 28 bp, Artificial Sequence
  Description of Artificial Sequence: Synthetic oligonucleotide
aaatagaaaaacaatcaattgggaaaac

SEQ ID NO: 4240 - DNA, 21 bp, Artificial Sequence
  Description of Artificial Sequence: Synthetic oligonucleotide
ggtcatcccaagggcttccac

SEQ ID NO: 4241 - DNA, 21 bp, Artificial Sequence
  Description of Artificial Sequence: Synthetic oligonucleotide
ctgtccctggggctggagacg

SEQ ID NO: 4242 - DNA, 19 bp, Artificial Sequence
  Description of Artificial Sequence: Synthetic oligonucleotide
gggaggcctacctggggcc

SEQ ID NO: 4243 - DNA, 22 bp, Artificial Sequence
  Description of Artificial Sequence: Synthetic oligonucleotide
ctggatgtgctcgaaggtccac

SEQ ID NO: 4244 - DNA, 22 bp, Artificial Sequence
  Description of Artificial Sequence: Synthetic oligonucleotide
ggaaagagatccagcctggctc

SEQ ID NO: 4245 - DNA, 22 bp, Artificial Sequence
  Description of Artificial Sequence: Synthetic oligonucleotide
gccactccaggtaagagccgag

SEQ ID NO: 4246 - DNA, 30 bp, Artificial Sequence
  Description of Artificial Sequence: Synthetic oligonucleotide
tgatagattaaatgtttctaggaatttgca

SEQ ID NO: 4247 - DNA, 28 bp, Artificial Sequence
  Description of Artificial Sequence: Synthetic oligonucleotide
tggaaatattcgattgcttagagtgacc

SEQ ID NO: 4248 - DNA, 19 bp, Artificial Sequence
  Description of Artificial Sequence: Synthetic oligonucleotide
ggacatgggggtggggtgc

SEQ ID NO: 4249 - DNA, 29 bp, Artificial Sequence
  Description of Artificial Sequence: Synthetic oligonucleotide
tgaaaaacacttagcatagctcctactcc

SEQ ID NO: 4250 - DNA, 27 bp, Artificial Sequence
  Description of Artificial Sequence: Synthetic oligonucleotide
tccatattgtaataattggcaggatct

SEQ ID NO: 4251 - DNA, 22 bp, Artificial Sequence
  Description of Artificial Sequence: Synthetic oligonucleotide
acctggagaacgggaaggagac

SEQ ID NO: 4252 - DNA, 21 bp, Artificial Sequence
  Description of Artificial Sequence: Synthetic oligonucleotide
cgcttccagcgagtgacaagg

SEQ ID NO: 4253 - DNA, 30 bp, Artificial Sequence
  Description of Artificial Sequence: Synthetic oligonucleotide
ccaagcgaaaaattatgtatcatctatacg

SEQ ID NO: 4254 - DNA, 18 bp, Artificial Sequence
  Description of Artificial Sequence: Synthetic oligonucleotide
cgcccctcgtggaggccg

SEQ ID NO: 4255 - DNA, 25 bp, Artificial Sequence
  Description of Artificial Sequence: Synthetic oligonucleotide
tctttcttttcgaagcgcagtttcg

SEQ ID NO: 4256 - DNA, 21 bp, Artificial Sequence
  Description of Artificial Sequence: Synthetic oligonucleotide
gggtgggtgactggggacttc

SEQ ID NO: 4257 - DNA, 22 bp, Artificial Sequence
  Description of Artificial Sequence: Synthetic oligonucleotide
caggctggagcagagagccatg

SEQ ID NO: 4258 - DNA, 28 bp, Artificial Sequence
  Description of Artificial Sequence: Synthetic oligonucleotide
ttctactttatttcatattcccaccacg

SEQ ID NO: 4259 - DNA, 21 bp, Artificial Sequence
  Description of Artificial Sequence: Synthetic oligonucleotide
aaagcctctctggcggcatcc

SEQ ID NO: 4260 - DNA, 25 bp, Artificial Sequence
  Description of Artificial Sequence: Synthetic oligonucleotide
gtgtggggctattgcacttagaatg

SEQ ID NO: 4261 - DNA, 26 bp, Artificial Sequence
  Description of Artificial Sequence: Synthetic oligonucleotide
tcagtaataaggtgaaatggccatag

SEQ ID NO: 4262 - DNA, 29 bp, Artificial Sequence
  Description of Artificial Sequence: Synthetic oligonucleotide
aattgaagctaaacattttttctttaggc

SEQ ID NO: 4263 - DNA, 19 bp, Artificial Sequence
  Description of Artificial Sequence: Synthetic oligonucleotide
ggtcaatggcctgccagcg

SEQ ID NO: 4264 - DNA, 20 bp, Artificial Sequence
  Description of Artificial Sequence: Synthetic oligonucleotide
agtttgccatccaccgcctg

SEQ ID NO: 4265 - DNA, 20 bp, Artificial Sequence
  Description of Artificial Sequence: Synthetic oligonucleotide
cacctcaggcagaccaggcg

SEQ ID NO: 4266 - DNA, 20 bp, Artificial Sequence
  Description of Artificial Sequence: Synthetic oligonucleotide
gcccttcaagtggtgtgggg

SEQ ID NO: 4267 - DNA, 19 bp, Artificial Sequence
  Description of Artificial Sequence: Synthetic oligonucleotide
ctggtgcaggcctggggcg

SEQ ID NO: 4268 - DNA, 28 bp, Artificial Sequence
  Description of Artificial Sequence: Synthetic oligonucleotide
aacaggatacaggaggaggacttaagtg

SEQ ID NO: 4269 - DNA, 21 bp, Artificial Sequence
  Description of Artificial Sequence: Synthetic oligonucleotide
gactgtgagcctggggtgctg

SEQ ID NO: 4270 - DNA, 19 bp, Artificial Sequence
  Description of Artificial Sequence: Synthetic oligonucleotide
gtgggaaagaggagtcgcc

SEQ ID NO: 4271 - DNA, 21 bp, Artificial Sequence
  Description of Artificial Sequence: Synthetic oligonucleotide
gcttcaccaagcccctttcgg

SEQ ID NO: 4272 - DNA, 20 bp, Artificial Sequence
  Description of Artificial Sequence: Synthetic oligonucleotide
gtttttgtgccgagcccccg

SEQ ID NO: 4273 - DNA, 28 bp, Artificial Sequence
  Description of Artificial Sequence: Synthetic oligonucleotide
tgggtatgaaaatgcagttagatagaac

SEQ ID NO: 4274 - DNA, 30 bp, Artificial Sequence
  Description of Artificial Sequence: Synthetic oligonucleotide
tgttctacacttagagtcaaagcaaattac

SEQ ID NO: 4275 - DNA, 23 bp, Artificial Sequence
  Description of Artificial Sequence: Synthetic oligonucleotide
agcaaagacttgcacatggtaag

SEQ ID NO: 4276 - DNA, 20 bp, Artificial Sequence
  Description of Artificial Sequence: Synthetic oligonucleotide
cgggggtggaggcattaccg

SEQ ID NO: 4277 - DNA, 21 bp, Artificial Sequence
  Description of Artificial Sequence: Synthetic oligonucleotide
agtcccccactcccccagctc

SEQ ID NO: 4278 - DNA, 19 bp, Artificial Sequence
  Description of Artificial Sequence: Synthetic oligonucleotide
ggagggggcactggggtag

SEQ ID NO: 4279 - DNA, 22 bp, Artificial Sequence
  Description of Artificial Sequence: Synthetic oligonucleotide
ctccccagtttctgggacaccg

SEQ ID NO: 4280 - DNA, 21 bp, Artificial Sequence
  Description of Artificial Sequence: Synthetic oligonucleotide
aaaagtacaagcggccccgtc

SEQ ID NO: 4281 - DNA, 19 bp, Artificial Sequence
  Description of Artificial Sequence: Synthetic oligonucleotide
caccgtcccacccacaccc

SEQ ID NO: 4282 - DNA, 26 bp, Artificial Sequence
  Description of Artificial Sequence: Synthetic oligonucleotide
ttccccaagttagacaggaagagatg

SEQ ID NO: 4283 - DNA, 29 bp, Artificial Sequence
  Description of Artificial Sequence: Synthetic oligonucleotide
gaaaactggaaggttaggtaaaactgtgg

SEQ ID NO: 4284 - DNA, 29 bp, Artificial Sequence
  Description of Artificial Sequence: Synthetic oligonucleotide
aaaaaatgataagtatgcaaggcaatagg

SEQ ID NO: 4285 - DNA, 22 bp, Artificial Sequence
  Description of Artificial Sequence: Synthetic oligonucleotide
gttggtccatggaaagcagcgc

SEQ ID NO: 4286 - DNA, 22 bp, Artificial Sequence
  Description of Artificial Sequence: Synthetic oligonucleotide
attggtgcagacaccctgcttc

SEQ ID NO: 4287 - DNA, 25 bp, Artificial Sequence
  Description of Artificial Sequence: Synthetic oligonucleotide
ccgagatcacgtcactgcactctag

SEQ ID NO: 4288 - DNA, 24 bp, Artificial Sequence
  Description of Artificial Sequence: Synthetic oligonucleotide
atgccagggttgcagtgagctagc

SEQ ID NO: 4289 - DNA, 20 bp, Artificial Sequence
  Description of Artificial Sequence: Synthetic oligonucleotide
gtgggaatccgccccactcc

SEQ ID NO: 4290 - DNA, 27 bp, Artificial Sequence
  Description of Artificial Sequence: Synthetic oligonucleotide
caatcttcctacctcagcctctcattg

SEQ ID NO: 4291 - DNA, 20 bp, Artificial Sequence
  Description of Artificial Sequence: Synthetic oligonucleotide
cttccagcctccgctcctgc

SEQ ID NO: 4292 - DNA, 29 bp, Artificial Sequence
  Description of Artificial Sequence: Synthetic oligonucleotide
gataagtgtgtctatctactgtgtcccag

SEQ ID NO: 4293 - DNA, 29 bp, Artificial Sequence
  Description of Artificial Sequence: Synthetic oligonucleotide
gggggacataaaatttttaaattaggtgc

SEQ ID NO: 4294 - DNA, 27 bp, Artificial Sequence
  Description of Artificial Sequence: Synthetic oligonucleotide
gcttcttggtgttctcaacaattttac

SEQ ID NO: 4295 - DNA, 20 bp, Artificial Sequence
  Description of Artificial Sequence: Synthetic oligonucleotide
aggctccagggagtcggggg

SEQ ID NO: 4296 - DNA, 24 bp, Artificial Sequence
  Description of Artificial Sequence: Synthetic oligonucleotide
cctcagtgtcttccctgtgcagtg

SEQ ID NO: 4297 - DNA, 29 bp, Artificial Sequence
  Description of Artificial Sequence: Synthetic oligonucleotide
tcttcttatacagctgttacacatgcacg

SEQ ID NO: 4298 - DNA, 29 bp, Artificial Sequence
  Description of Artificial Sequence: Synthetic oligonucleotide
tgtctctaagattgtttcttagctgtaat

SEQ ID NO: 4299 - DNA, 30 bp, Artificial Sequence
  Description of Artificial Sequence: Synthetic oligonucleotide
ggaagtacagaaacctatagaagggtatcg

SEQ ID NO: 4300 - DNA, 21 bp, Artificial Sequence
  Description of Artificial Sequence: Synthetic oligonucleotide
ccaagaggacgcagcactggc

SEQ ID NO: 4301 - DNA, 21 bp, Artificial Sequence
  Description of Artificial Sequence: Synthetic oligonucleotide
gcacggatgtctgcctcctgc

SEQ ID NO: 4302 - DNA, 26 bp, Artificial Sequence
  Description of Artificial Sequence: Synthetic oligonucleotide
ttctccatgtccttggctatatttga

SEQ ID NO: 4303 - DNA, 23 bp, Artificial Sequence
  Description of Artificial Sequence: Synthetic oligonucleotide
tccctggtcccttcattttctgc

SEQ ID NO: 4304 - DNA, 27 bp, Artificial Sequence
  Description of Artificial Sequence: Synthetic oligonucleotide
tccttttcttttaatgtcattgtttgg

SEQ ID NO: 4305 - DNA, 24 bp, Artificial Sequence
  Description of Artificial Sequence: Synthetic oligonucleotide
catacctgtgttggccctgacagc

SEQ ID NO: 4306 - DNA, 30 bp, Artificial Sequence
  Description of Artificial Sequence: Synthetic oligonucleotide
gcatttaataatagcatcatcttcacaggg

SEQ ID NO: 4307 - DNA, 20 bp, Artificial Sequence
  Description of Artificial Sequence: Synthetic oligonucleotide
ccgcatctcctggagttggg

SEQ ID NO: 4308 - DNA, 21 bp, Artificial Sequence
  Description of Artificial Sequence: Synthetic oligonucleotide
ggaagggaagggtcccgtgag

SEQ ID NO: 4309 - DNA, 22 bp, Artificial Sequence
  Description of Artificial Sequence: Synthetic oligonucleotide
ttgttgcccacttaggggctgc

SEQ ID NO: 4310 - DNA, 26 bp, Artificial Sequence
  Description of Artificial Sequence: Synthetic oligonucleotide
tgttctgggtactaatccttttcatg

SEQ ID NO: 4311 - DNA, 18 bp, Artificial Sequence
  Description of Artificial Sequence: Synthetic oligonucleotide
cactgcccaccgggcttc

SEQ ID NO: 4312 - DNA, 28 bp, Artificial Sequence
  Description of Artificial Sequence: Synthetic oligonucleotide
accctaagtggtctcaattgtttactag

SEQ ID NO: 4313 - DNA, 20 bp, Artificial Sequence
  Description of Artificial Sequence: Synthetic oligonucleotide
cggagtctcggaacgcctgc

SEQ ID NO: 4314 - DNA, 27 bp, Artificial Sequence
  Description of Artificial Sequence: Synthetic oligonucleotide
aagcaatggcaattaaaagtagagtag

SEQ ID NO: 4315 - DNA, 26 bp, Artificial Sequence
  Description of Artificial Sequence: Synthetic oligonucleotide
tgccaccttctgtacgagtttgtttg

SEQ ID NO: 4316 - DNA, 30 bp, Artificial Sequence
  Description of Artificial Sequence: Synthetic oligonucleotide
gagaatggatacttgaggatcagtatagtc

SEQ ID NO: 4317 - DNA, 24 bp, Artificial Sequence
  Description of Artificial Sequence: Synthetic oligonucleotide
caaagggtctcattcagctcaccc

SEQ ID NO: 4318 - DNA, 30 bp, Artificial Sequence
  Description of Artificial Sequence: Synthetic oligonucleotide
tgattgagatgatatttttaaacaaaaaag

SEQ ID NO: 4319 - DNA, 30 bp, Artificial Sequence
  Description of Artificial Sequence: Synthetic oligonucleotide
agaagtcttttcaatacctttttgaacaac

SEQ ID NO: 4320 - DNA, 19 bp, Artificial Sequence
  Description of Artificial Sequence: Synthetic oligonucleotide
ggcagtggctgcgattccg

SEQ ID NO: 4321 - DNA, 30 bp, Artificial Sequence
  Description of Artificial Sequence: Synthetic oligonucleotide
tgcactagttcctaacctatgtaacctacc

SEQ ID NO: 4322 - DNA, 26 bp, Artificial Sequence
  Description of Artificial Sequence: Synthetic oligonucleotide
aaataacatttattgcatgctcattg

SEQ ID NO: 4323 - DNA, 29 bp, Artificial Sequence
  Description of Artificial Sequence: Synthetic oligonucleotide
tcaatgaactctaaacttccttccaactc

SEQ ID NO: 4324 - DNA, 19 bp, Artificial Sequence
  Description of Artificial Sequence: Synthetic oligonucleotide
accgcaaccgggttcctgc

SEQ ID NO: 4325 - DNA, 30 bp, Artificial Sequence
  Description of Artificial Sequence: Synthetic oligonucleotide
tcttaagtctaattaagccaaacaaactaa

SEQ ID NO: 4326 - DNA, 27 bp, Artificial Sequence
  Description of Artificial Sequence: Synthetic oligonucleotide
aggacacttcaaatggtgtagtttcac

SEQ ID NO: 4327 - DNA, 22 bp, Artificial Sequence
  Description of Artificial Sequence: Synthetic oligonucleotide
ctgaagcccagagagccaagcc

SEQ ID NO: 4328 - DNA, 18 bp, Artificial Sequence
  Description of Artificial Sequence: Synthetic oligonucleotide
gcggggcgggcctactgc

SEQ ID NO: 4329 - DNA, 21 bp, Artificial Sequence
  Description of Artificial Sequence: Synthetic oligonucleotide
cttctctccgaggctcgcggc

SEQ ID NO: 4330 - DNA, 27 bp, Artificial Sequence
  Description of Artificial Sequence: Synthetic oligonucleotide
gatgaatagttgcactttaattttcac

SEQ ID NO: 4331 - DNA, 28 bp, Artificial Sequence
  Description of Artificial Sequence: Synthetic oligonucleotide
tctttctagtgctgtgtctcattgtgac

SEQ ID NO: 4332 - DNA, 22 bp, Artificial Sequence
  Description of Artificial Sequence: Synthetic oligonucleotide
gtggctcgtgtccttcccaacg

SEQ ID NO: 4333 - DNA, 19 bp, Artificial Sequence
  Description of Artificial Sequence: Synthetic oligonucleotide
ctcccacccctgaaccccc

SEQ ID NO: 4334 - DNA, 22 bp, Artificial Sequence
  Description of Artificial Sequence: Synthetic oligonucleotide
atcagtcaggaggccgtgcagc

SEQ ID NO: 4335 - DNA, 27 bp, Artificial Sequence
  Description of Artificial Sequence: Synthetic oligonucleotide
tggtagtttgttatagaggtttgcgtc

SEQ ID NO: 4336 - DNA, 20 bp, Artificial Sequence
  Description of Artificial Sequence: Synthetic oligonucleotide
ggctgctcagctgcaggaac

SEQ ID NO: 4337 - DNA, 28 bp, Artificial Sequence
  Description of Artificial Sequence: Synthetic oligonucleotide
tgttctcaactgtgttaacttattgaag

SEQ ID NO: 4338 - DNA, 29 bp, Artificial Sequence
  Description of Artificial Sequence: Synthetic oligonucleotide
tttctttagttagattaggctaggctgtg

SEQ ID NO: 4339 - DNA, 19 bp, Artificial Sequence
  Description of Artificial Sequence: Synthetic oligonucleotide
cagagccagccaatcccgg

SEQ ID NO: 4340 - DNA, 28 bp, Artificial Sequence
  Description of Artificial Sequence: Synthetic oligonucleotide
catttaccaggagaaaccatatttcagg

SEQ ID NO: 4341 - DNA, 21 bp, Artificial Sequence
  Description of Artificial Sequence: Synthetic oligonucleotide
atctcggttgccccctacccc

SEQ ID NO: 4342 - DNA, 30 bp, Artificial Sequence
  Description of Artificial Sequence: Synthetic oligonucleotide
cacaactaactacacattctgacttaaggg

SEQ ID NO: 4343 - DNA, 18 bp, Artificial Sequence
  Description of Artificial Sequence: Synthetic oligonucleotide
gggggtgggtggggcagt

SEQ ID NO: 4344 - DNA, 22 bp, Artificial Sequence
  Description of Artificial Sequence: Synthetic oligonucleotide
ctgcactccatctcggccagtc

SEQ ID NO: 4345 - DNA, 20 bp, Artificial Sequence
  Description of Artificial Sequence: Synthetic oligonucleotide
ctttgcgcgcggcgctaacg

SEQ ID NO: 4346 - DNA, 18 bp, Artificial Sequence
  Description of Artificial Sequence: Synthetic oligonucleotide
ggcccctcagtgaggggc

SEQ ID NO: 4347 - DNA, 19 bp, Artificial Sequence
  Description of Artificial Sequence: Synthetic oligonucleotide
aggggctgagtgggggaac

SEQ ID NO: 4348 - DNA, 23 bp, Artificial Sequence
  Description of Artificial Sequence: Synthetic oligonucleotide
cagacatgagttactgcgccccg

SEQ ID NO: 4349 - DNA, 19 bp, Artificial Sequence
  Description of Artificial Sequence: Synthetic oligonucleotide
gggagaggcccttgccacg

SEQ ID NO: 4350 - DNA, 23 bp, Artificial Sequence
  Description of Artificial Sequence: Synthetic oligonucleotide
ctgtcccacaacgctcactcagg

SEQ ID NO: 4351 - DNA, 18 bp, Artificial Sequence
  Description of Artificial Sequence: Synthetic oligonucleotide
ggccaggggctggagggc

SEQ ID NO: 4352 - DNA, 22 bp, Artificial Sequence
  Description of Artificial Sequence: Synthetic oligonucleotide
agttgttggtggaagcgggagg

SEQ ID NO: 4353 - DNA, 20 bp, Artificial Sequence
  Description of Artificial Sequence: Synthetic oligonucleotide
gaggtctcccgcaggagccg

SEQ ID NO: 4354 - DNA, 29 bp, Artificial Sequence
  Description of Artificial Sequence: Synthetic oligonucleotide
cctcccaaatctcataatactgagtttcc

SEQ ID NO: 4355 - DNA, 19 bp, Artificial Sequence
  Description of Artificial Sequence: Synthetic oligonucleotide
gacccccggaaacgtcccg

SEQ ID NO: 4356 - DNA, 24 bp, Artificial Sequence
  Description of Artificial Sequence: Synthetic oligonucleotide
cactccccttgttccatctttccc

SEQ ID NO: 4357 - DNA, 23 bp, Artificial Sequence
  Description of Artificial Sequence: Synthetic oligonucleotide
cccatcaagaagagcctcacgac

SEQ ID NO: 4358 - DNA, 24 bp, Artificial Sequence
  Description of Artificial Sequence: Synthetic oligonucleotide
ttcttctgaatgtcccacccactc

SEQ ID NO: 4359 - DNA, 24 bp, Artificial Sequence
  Description of Artificial Sequence: Synthetic oligonucleotide
acagcagaattctccagggaagac

SEQ ID NO: 4360 - DNA, 25 bp, Artificial Sequence
  Description of Artificial Sequence: Synthetic oligonucleotide
ggtagaactgccctcataagcaggg

SEQ ID NO: 4361 - DNA, 25 bp, Artificial Sequence
  Description of Artificial Sequence: Synthetic oligonucleotide
tgacatctgagaaatgggatggaag

SEQ ID NO: 4362 - DNA, 23 bp, Artificial Sequence
  Description of Artificial Sequence: Synthetic oligonucleotide
ggatgggagctccctgtacaggg

SEQ ID NO: 4363 - DNA, 23 bp, Artificial Sequence
  Description of Artificial Sequence: Synthetic oligonucleotide
caagccctgttcttcctctcccg

SEQ ID NO: 4364 - DNA, 24 bp, Artificial Sequence
  Description of Artificial Sequence: Synthetic oligonucleotide
ccatactctactggcacaaggcac

SEQ ID NO: 4365 - DNA, 21 bp, Artificial Sequence
  Description of Artificial Sequence: Synthetic oligonucleotide
agtatgggaggcaggcagcag

SEQ ID NO: 4366 - DNA, 25 bp, Artificial Sequence
  Description of Artificial Sequence: Synthetic oligonucleotide
aacagctttgggtatagtctcgggc

SEQ ID NO: 4367 - DNA, 24 bp, Artificial Sequence
  Description of Artificial Sequence: Synthetic oligonucleotide
cttaagcacacctttcagcccacg

SEQ ID NO: 4368 - DNA, 23 bp, Artificial Sequence
  Description of Artificial Sequence: Synthetic oligonucleotide
ccatggagctcttgggaatctcg

SEQ ID NO: 4369 - DNA, 24 bp, Artificial Sequence
  Description of Artificial Sequence: Synthetic oligonucleotide
tgcacagtataggcaaatcagggc

SEQ ID NO: 4370 - DNA, 26 bp, Artificial Sequence
  Description of Artificial Sequence: Synthetic oligonucleotide
gctgcaaagatattgggttttggttg

SEQ ID NO: 4371 - DNA, 26 bp, Artificial Sequence
  Description of Artificial Sequence: Synthetic oligonucleotide
caaaattcacttgtgccctatggagg

SEQ ID NO: 4372 - DNA, 22 bp, Artificial Sequence
  Description of Artificial Sequence: Synthetic oligonucleotide
gggctccctgtccttgtggtac

SEQ ID NO: 4373 - DNA, 23 bp, Artificial Sequence
  Description of Artificial Sequence: Synthetic oligonucleotide
tggttggacccagtaacccagag

SEQ ID NO: 4374 - DNA, 21 bp, Artificial Sequence
  Description of Artificial Sequence: Synthetic oligonucleotide
caaagccagcaatgtcaggcc

SEQ ID NO: 4375 - DNA, 23 bp, Artificial Sequence
  Description of Artificial Sequence: Synthetic oligonucleotide
gtcacatgctgcctgagtcacac

SEQ ID NO: 4376 - DNA, 25 bp, Artificial Sequence
  Description of Artificial Sequence: Synthetic oligonucleotide
cgtgaattcttcccaatttagcctg

SEQ ID NO: 4377 - DNA, 24 bp, Artificial Sequence
  Description of Artificial Sequence: Synthetic oligonucleotide
caggacatcaacatcctcctcacc

SEQ ID NO: 4378 - DNA, 24 bp, Artificial Sequence
  Description of Artificial Sequence: Synthetic oligonucleotide
ggggttatatcctcttccctcccg

SEQ ID NO: 4379 - DNA, 24 bp, Artificial Sequence
  Description of Artificial Sequence: Synthetic oligonucleotide
cagggacactttattgctcacccc

SEQ ID NO: 4380 - DNA, 25 bp, Artificial Sequence
  Description of Artificial Sequence: Synthetic oligonucleotide
cccctgagaccttactccttccagc

SEQ ID NO: 4381 - DNA, 24 bp, Artificial Sequence
  Description of Artificial Sequence: Synthetic oligonucleotide
tgcagggtgtttgtaaacagcagc

SEQ ID NO: 4382 - DNA, 20 bp, Artificial Sequence
  Description of Artificial Sequence: Synthetic oligonucleotide
cggatgtgaccctggacccc

SEQ ID NO: 4383 - DNA, 27 bp, Artificial Sequence
  Description of Artificial Sequence: Synthetic oligonucleotide
ggtttaacccaggatctcactgaaaag

SEQ ID NO: 4384 - DNA, 24 bp, Artificial Sequence
  Description of Artificial Sequence: Synthetic oligonucleotide
ctgccccttgtctgcactaaactg

SEQ ID NO: 4385 - DNA, 25 bp, Artificial Sequence
  Description of Artificial Sequence: Synthetic oligonucleotide
tggaaaatatacctggggactgaag

SEQ ID NO: 4386 - DNA, 23 bp, Artificial Sequence
  Description of Artificial Sequence: Synthetic oligonucleotide
tcgacagccctcaagatctggtc

SEQ ID NO: 4387 - DNA, 22 bp, Artificial Sequence
  Description of Artificial Sequence: Synthetic oligonucleotide
gatggattcaccccatctcccg

SEQ ID NO: 4388 - DNA, 22 bp, Artificial Sequence
  Description of Artificial Sequence: Synthetic oligonucleotide
gcaagggtgtgagatgttcccc

SEQ ID NO: 4389 - DNA, 24 bp, Artificial Sequence
  Description of Artificial Sequence: Synthetic oligonucleotide
cttgcattattcttcccgctctcc

SEQ ID NO: 4390 - DNA, 27 bp, Artificial Sequence
  Description of Artificial Sequence: Synthetic oligonucleotide
ggacattggattcatttcctcaaaatg

SEQ ID NO: 4391 - DNA, 28 bp, Artificial Sequence
  Description of Artificial Sequence: Synthetic oligonucleotide
gggtgagagctactttttctacctcctg

SEQ ID NO: 4392 - DNA, 26 bp, Artificial Sequence
  Description of Artificial Sequence: Synthetic oligonucleotide
aggagctttgtgagtcctgttgtaac

SEQ ID NO: 4393 - DNA, 20 bp, Artificial Sequence
  Description of Artificial Sequence: Synthetic oligonucleotide
atcagctcccagccccaccc

SEQ ID NO: 4394 - DNA, 22 bp, Artificial Sequence
  Description of Artificial Sequence: Synthetic oligonucleotide
gtcccactaccctcatccccac

SEQ ID NO: 4395 - DNA, 22 bp, Artificial Sequence
  Description of Artificial Sequence: Synthetic oligonucleotide
gccaaagaccagcaggagcatc

SEQ ID NO: 4396 - DNA, 24 bp, Artificial Sequence
  Description of Artificial Sequence: Synthetic oligonucleotide
gggagaagcatacccatcctgagg

SEQ ID NO: 4397 - DNA, 22 bp, Artificial Sequence
  Description of Artificial Sequence: Synthetic oligonucleotide
cgtggttctggctccacatttc

SEQ ID NO: 4398 - DNA, 24 bp, Artificial Sequence
  Description of Artificial Sequence: Synthetic oligonucleotide
gagtcagcctcagggtctgttctg

SEQ ID NO: 4399 - DNA, 23 bp, Artificial Sequence
  Description of Artificial Sequence: Synthetic oligonucleotide
cttttctctccacatcccagccc

SEQ ID NO: 4400 - DNA, 23 bp, Artificial Sequence
  Description of Artificial Sequence: Synthetic oligonucleotide
tgggaaagttggagaaccatccc

SEQ ID NO: 4401 - DNA, 24 bp, Artificial Sequence
  Description of Artificial Sequence: Synthetic oligonucleotide
ccctattcgtttttgaaccggtcg

SEQ ID NO: 4402 - DNA, 23 bp, Artificial Sequence
  Description of Artificial Sequence: Synthetic oligonucleotide
ttggtagcctcgatgtcctcctc

SEQ ID NO: 4403 - DNA, 23 bp, Artificial Sequence
  Description of Artificial Sequence: Synthetic oligonucleotide
ccagccagcaagtcaatcagaag

SEQ ID NO: 4404 - DNA, 23 bp, Artificial Sequence
  Description of Artificial Sequence: Synthetic oligonucleotide
tccaggggaacatagatggctgg

SEQ ID NO: 4405 - DNA, 24 bp, Artificial Sequence
  Description of Artificial Sequence: Synthetic oligonucleotide
catcagtcaggtattggggtgctc

SEQ ID NO: 4406 - DNA, 24 bp, Artificial Sequence
  Description of Artificial Sequence: Synthetic oligonucleotide
actgtgcctgcttgccattaatcg

SEQ ID NO: 4407 - DNA, 24 bp, Artificial Sequence
  Description of Artificial Sequence: Synthetic oligonucleotide
ggaggaggctgaaggagaaagaag

SEQ ID NO: 4408 - DNA, 23 bp, Artificial Sequence
  Description of Artificial Sequence: Synthetic oligonucleotide
aggaagcatcagatgggtgtcgg

SEQ ID NO: 4409 - DNA, 23 bp, Artificial Sequence
  Description of Artificial Sequence: Synthetic oligonucleotide
cattcagtgctggagaccagctg

SEQ ID NO: 4410 - DNA, 23 bp, Artificial Sequence
  Description of Artificial Sequence: Synthetic oligonucleotide
tttttcgcttggatcggaaagtc

SEQ ID NO: 4411 - DNA, 23 bp, Artificial Sequence
  Description of Artificial Sequence: Synthetic oligonucleotide
aatgcatcacacaagcccacagc

SEQ ID NO: 4412 - DNA, 23 bp, Artificial Sequence
  Description of Artificial Sequence: Synthetic oligonucleotide
ttcccccatgatccctagcctac

SEQ ID NO: 4413 - DNA, 22 bp, Artificial Sequence
  Description of Artificial Sequence: Synthetic oligonucleotide
gccagtcagaactgccctcagg

SEQ ID NO: 4414 - DNA, 24 bp, Artificial Sequence
  Description of Artificial Sequence: Synthetic oligonucleotide
cagagaattgataattgcccggcg

SEQ ID NO: 4415 - DNA, 24 bp, Artificial Sequence
  Description of Artificial Sequence: Synthetic oligonucleotide
aggtgatcctcttgcttgcctctg

SEQ ID NO: 4416 - DNA, 22 bp, Artificial Sequence
  Description of Artificial Sequence: Synthetic oligonucleotide
atgctcctgccctaaagtgccg

SEQ ID NO: 4417 - DNA, 24 bp, Artificial Sequence
  Description of Artificial Sequence: Synthetic oligonucleotide
caggctatttgaggttgaggcaag

SEQ ID NO: 4418 - DNA, 22 bp, Artificial Sequence
  Description of Artificial Sequence: Synthetic oligonucleotide
aaaaaagggaaagcggcagctc

SEQ ID NO: 4419 - DNA, 23 bp, Artificial Sequence
  Description of Artificial Sequence: Synthetic oligonucleotide
cagcaattcagtcagccactggg

SEQ ID NO: 4420 - DNA, 22 bp, Artificial Sequence
  Description of Artificial Sequence: Synthetic oligonucleotide
aagggacaggctgcttggatcg

SEQ ID NO: 4421 - DNA, 24 bp, Artificial Sequence
  Description of Artificial Sequence: Synthetic oligonucleotide
cacttccagaactcctcttcccac

SEQ ID NO: 4422 - DNA, 24 bp, Artificial Sequence
  Description of Artificial Sequence: Synthetic oligonucleotide
ttgagaaaaatgcatttgtcccgc

SEQ ID NO: 4423 - DNA, 22 bp, Artificial Sequence
  Description of Artificial Sequence: Synthetic oligonucleotide
gcagagaaaagcctgcactggg

SEQ ID NO: 4424 - DNA, 24 bp, Artificial Sequence
  Description of Artificial Sequence: Synthetic oligonucleotide
gcagctgagagtgagttcacacca

SEQ ID NO: 4425 - DNA, 24 bp, Artificial Sequence
  Description of Artificial Sequence: Synthetic oligonucleotide
cctggtgatctggttgctttgacg

SEQ ID NO: 4426 - DNA, 23 bp, Artificial Sequence
  Description of Artificial Sequence: Synthetic oligonucleotide
actctccctttttgcagggtcac

SEQ ID NO: 4427 - DNA, 23 bp, Artificial Sequence
  Description of Artificial Sequence: Synthetic oligonucleotide
ctgtcttcccccattcttcaccc

SEQ ID NO: 4428 - DNA, 23 bp, Artificial Sequence
  Description of Artificial Sequence: Synthetic oligonucleotide
cccctattaacgctgacttgggg

SEQ ID NO: 4429 - DNA, 24 bp, Artificial Sequence
  Description of Artificial Sequence: Synthetic oligonucleotide
cagagtcaccaaccccagtaccag

SEQ ID NO: 4430 - DNA, 23 bp, Artificial Sequence
  Description of Artificial Sequence: Synthetic oligonucleotide
tttcccaaggttagggacatgca

SEQ ID NO: 4431 - DNA, 24 bp, Artificial Sequence
  Description of Artificial Sequence: Synthetic oligonucleotide
ctgcttggtatttccctgaggctg

SEQ ID NO: 4432 - DNA, 25 bp, Artificial Sequence
  Description of Artificial Sequence: Synthetic oligonucleotide
cctggaaatagggtaaaagctgcac

SEQ ID NO: 4433 - DNA, 24 bp, Artificial Sequence
  Description of Artificial Sequence: Synthetic oligonucleotide
tccttgacccctccacaatctacg

SEQ ID NO: 4434 - DNA, 24 bp, Artificial Sequence
  Description of Artificial Sequence: Synthetic oligonucleotide
ccacagtcaggttgtttgatgggg

SEQ ID NO: 4435 - DNA, 24 bp, Artificial Sequence
  Description of Artificial Sequence: Synthetic oligonucleotide
tcctcctcttctcacctgcttgtg

SEQ ID NO: 4436 - DNA, 25 bp, Artificial Sequence
  Description of Artificial Sequence: Synthetic oligonucleotide
caccagttttaagtgcacaacccag

SEQ ID NO: 4437 - DNA, 23 bp, Artificial Sequence
  Description of Artificial Sequence: Synthetic oligonucleotide
aggggactagggaactccccttg

SEQ ID NO: 4438 - DNA, 23 bp, Artificial Sequence
  Description of Artificial Sequence: Synthetic oligonucleotide
tggcacaaggtcctatttggagc

SEQ ID NO: 4439 - DNA, 24 bp, Artificial Sequence
  Description of Artificial Sequence: Synthetic oligonucleotide
gcacttgtccctccttgtgtgttg

SEQ ID NO: 4440 - DNA, 23 bp, Artificial Sequence
  Description of Artificial Sequence: Synthetic oligonucleotide
gtcccttgaaggggaagtagggg

SEQ ID NO: 4441 - DNA, 24 bp, Artificial Sequence
  Description of Artificial Sequence: Synthetic oligonucleotide
cctcattttcagttctgggatggg

SEQ ID NO: 4442 - DNA, 23 bp, Artificial Sequence
  Description of Artificial Sequence: Synthetic oligonucleotide
cccttcatgcttatgtctccccg

SEQ ID NO: 4443 - DNA, 24 bp, Artificial Sequence
  Description of Artificial Sequence: Synthetic oligonucleotide
tttacaagctgcatcccatctcag

SEQ ID NO: 4444 - DNA, 23 bp, Artificial Sequence
  Description of Artificial Sequence: Synthetic oligonucleotide
cttacgcccatctcggacaaaag

SEQ ID NO: 4445 - DNA, 22 bp, Artificial Sequence
  Description of Artificial Sequence: Synthetic oligonucleotide
gttgaacatcatggttgccgac

SEQ ID NO: 4446 - DNA, 23 bp, Artificial Sequence
  Description of Artificial Sequence: Synthetic oligonucleotide
gaacactgtgggccctcaagttc

SEQ ID NO: 4447 - DNA, 23 bp, Artificial Sequence
  Description of Artificial Sequence: Synthetic oligonucleotide
gggatagatgaaaggggccatcc

SEQ ID NO: 4448 - DNA, 24 bp, Artificial Sequence
  Description of Artificial Sequence: Synthetic oligonucleotide
tttttcctgcatcctgtctggaag

SEQ ID NO: 4449 - DNA, 23 bp, Artificial Sequence
  Description of Artificial Sequence: Synthetic oligonucleotide
ccctcatggtcatgagctccata

SEQ ID NO: 4450 - DNA, 24 bp, Artificial Sequence
  Description of Artificial Sequence: Synthetic oligonucleotide
gcaatgttcacacaaaaaatgccc

SEQ ID NO: 4451 - DNA, 24 bp, Artificial Sequence
  Description of Artificial Sequence: Synthetic oligonucleotide
tggaaacgggattacaatgaagcg

SEQ ID NO: 4452 - DNA, 25 bp, Artificial Sequence
  Description of Artificial Sequence: Synthetic oligonucleotide
ggcactgatggtacctcattaggcg

SEQ ID NO: 4453 - DNA, 24 bp, Artificial Sequence
  Description of Artificial Sequence: Synthetic oligonucleotide
tcttctgtgtcacacacagccctc

SEQ ID NO: 4454 - DNA, 25 bp, Artificial Sequence
  Description of Artificial Sequence: Synthetic oligonucleotide
cagttgccatactgaacagccattg

SEQ ID NO: 4455 - DNA, 23 bp, Artificial Sequence
  Description of Artificial Sequence: Synthetic oligonucleotide
ctgcttgctctaaacccagcaac

SEQ ID NO: 4456 - DNA, 22 bp, Artificial Sequence
  Description of Artificial Sequence: Synthetic oligonucleotide
ccaaatccagaggctccaacag

SEQ ID NO: 4457 - DNA, 24 bp, Artificial Sequence
  Description of Artificial Sequence: Synthetic oligonucleotide
tccttgttgcactggttaggatgg

SEQ ID NO: 4458 - DNA, 21 bp, Artificial Sequence
  Description of Artificial Sequence: Synthetic oligonucleotide
gagtggggtggggtgaaatgc

SEQ ID NO: 4459 - DNA, 25 bp, Artificial Sequence
  Description of Artificial Sequence: Synthetic oligonucleotide
gacacatactgtccaattcccctgg

SEQ ID NO: 4460 - DNA, 25 bp, Artificial Sequence
  Description of Artificial Sequence: Synthetic oligonucleotide
tgcagttcactgactctcctgcatg

SEQ ID NO: 4461 - DNA, 24 bp, Artificial Sequence
  Description of Artificial Sequence: Synthetic oligonucleotide
aaagtctcccagctgctccttctg

SEQ ID NO: 4462 - DNA, 23 bp, Artificial Sequence
  Description of Artificial Sequence: Synthetic oligonucleotide
agctcagaccttggccatgaacg

SEQ ID NO: 4463 - DNA, 22 bp, Artificial Sequence
  Description of Artificial Sequence: Synthetic oligonucleotide
ctgcacaatagaagcccccctc

SEQ ID NO: 4464 - DNA, 25 bp, Artificial Sequence
  Description of Artificial Sequence: Synthetic oligonucleotide
agtgaggccagattttcctcttgtg

SEQ ID NO: 4465 - DNA, 22 bp, Artificial Sequence
  Description of Artificial Sequence: Synthetic oligonucleotide
ctcgtgtttcctgatcctgccc

SEQ ID NO: 4466 - DNA, 21 bp, Artificial Sequence
  Description of Artificial Sequence: Synthetic oligonucleotide
cgcttcaccccagaagcagtc

SEQ ID NO: 4467 - DNA, 22 bp, Artificial Sequence
  Description of Artificial Sequence: Synthetic oligonucleotide
aacaatggggaggcgtttctca

SEQ ID NO: 4468 - DNA, 23 bp, Artificial Sequence
  Description of Artificial Sequence: Synthetic oligonucleotide
gagcattggatattcccatcccc

SEQ ID NO: 4469 - DNA, 23 bp, Artificial Sequence
  Description of Artificial Sequence: Synthetic oligonucleotide
agttgtgtggcagaaggggaacc

SEQ ID NO: 4470 - DNA, 25 bp, Artificial Sequence
  Description of Artificial Sequence: Synthetic oligonucleotide
gcaacttgggagagtgtgagcttcg

SEQ ID NO: 4471 - DNA, 22 bp, Artificial Sequence
  Description of Artificial Sequence: Synthetic oligonucleotide
ccgtttggattcccaggagacg

SEQ ID NO: 4472 - DNA, 25 bp, Artificial Sequence
  Description of Artificial Sequence: Synthetic oligonucleotide
tgagaatggtggttcttccatcacc

SEQ ID NO: 4473 - DNA, 25 bp, Artificial Sequence
  Description of Artificial Sequence: Synthetic oligonucleotide
gggtcttgggttagagccaaaatgc

SEQ ID NO: 4474 - DNA, 22 bp, Artificial Sequence
  Description of Artificial Sequence: Synthetic oligonucleotide
ctactggctgggggatcaccag

SEQ ID NO: 4475 - DNA, 24 bp, Artificial Sequence
  Description of Artificial Sequence: Synthetic oligonucleotide
cccacagaaccacagactttgaag

SEQ ID NO: 4476 - DNA, 25 bp, Artificial Sequence
  Description of Artificial Sequence: Synthetic oligonucleotide
aaaaatggaggagaaaacaacccag

SEQ ID NO: 4477 - DNA, 24 bp, Artificial Sequence
  Description of Artificial Sequence: Synthetic oligonucleotide
tttgccatcactgccattaaggtg

SEQ ID NO: 4478 - DNA, 23 bp, Artificial Sequence
  Description of Artificial Sequence: Synthetic oligonucleotide
atagtcagcccacccgctcaaca

SEQ ID NO: 4479 - DNA, 24 bp, Artificial Sequence
  Description of Artificial Sequence: Synthetic oligonucleotide
ggcccctatcacttccatatgtgc

SEQ ID NO: 4480 - DNA, 25 bp, Artificial Sequence
  Description of Artificial Sequence: Synthetic oligonucleotide
gaaactccaagtctggaatcagcag

SEQ ID NO: 4481 - DNA, 24 bp, Artificial Sequence
  Description of Artificial Sequence: Synthetic oligonucleotide
gtctgttggggcttagtgcatttg

SEQ ID NO: 4482 - DNA, 24 bp, Artificial Sequence
  Description of Artificial Sequence: Synthetic oligonucleotide
gctgtgcgactgggcaatattttg

SEQ ID NO: 4483 - DNA, 22 bp, Artificial Sequence
  Description of Artificial Sequence: Synthetic oligonucleotide
ctgagaatctgggggtgaggag

SEQ ID NO: 4484 - DNA, 25 bp, Artificial Sequence
  Description of Artificial Sequence: Synthetic oligonucleotide
acactggacccattttgcagatagg

SEQ ID NO: 4485 - DNA, 22 bp, Artificial Sequence
  Description of Artificial Sequence: Synthetic oligonucleotide
tgggccgttcagagtgtcatcg

SEQ ID NO: 4486 - DNA, 25 bp, Artificial Sequence
  Description of Artificial Sequence: Synthetic oligonucleotide
ccctaactgcatcaccttttccctc

SEQ ID NO: 4487 - DNA, 25 bp, Artificial Sequence
  Description of Artificial Sequence: Synthetic oligonucleotide
tgacttggccaagttacacctcagg

SEQ ID NO: 4488 - DNA, 24 bp, Artificial Sequence
  Description of Artificial Sequence: Synthetic oligonucleotide
tgagggttggaaaagcttgtctgc

SEQ ID NO: 4489 - DNA, 25 bp, Artificial Sequence
  Description of Artificial Sequence: Synthetic oligonucleotide
cccagtcatcctcagtttctttcac

SEQ ID NO: 4490 - DNA, 23 bp, Artificial Sequence
  Description of Artificial Sequence: Synthetic oligonucleotide
agggagatcagcttgctcacagc

SEQ ID NO: 4491 - DNA, 25 bp, Artificial Sequence
  Description of Artificial Sequence: Synthetic oligonucleotide
ccatgagagatgcaaagtgcttgag

SEQ ID NO: 4492 - DNA, 25 bp, Artificial Sequence
  Description of Artificial Sequence: Synthetic oligonucleotide
ccgtaggcacaaaaatggtaaaggg

SEQ ID NO: 4493 - DNA, 26 bp, Artificial Sequence
  Description of Artificial Sequence: Synthetic oligonucleotide
caggagactaagacgtgtcctttgca

SEQ ID NO: 4494 - DNA, 23 bp, Artificial Sequence
  Description of Artificial Sequence: Synthetic oligonucleotide
gccccatcaagccgacttctacc

SEQ ID NO: 4495 - DNA, 22 bp, Artificial Sequence
  Description of Artificial Sequence: Synthetic oligonucleotide
aagatctggggttggggatggg

SEQ ID NO: 4496 - DNA, 23 bp, Artificial Sequence
  Description of Artificial Sequence: Synthetic oligonucleotide
cctcccaactcctcctgcaaagc

SEQ ID NO: 4497 - DNA, 25 bp, Artificial Sequence
  Description of Artificial Sequence: Synthetic oligonucleotide
ctccagttctttgcaaatgacatgg

SEQ ID NO: 4498 - DNA, 25 bp, Artificial Sequence
  Description of Artificial Sequence: Synthetic oligonucleotide
agcagggaacaggaaactcagtctc

SEQ ID NO: 4499 - DNA, 25 bp, Artificial Sequence
  Description of Artificial Sequence: Synthetic oligonucleotide
acagccactagtcacatgtggctac

SEQ ID NO: 4500 - DNA, 25 bp, Artificial Sequence
  Description of Artificial Sequence: Synthetic oligonucleotide
caagataggggtgaagaggtggaac

SEQ ID NO: 4501 - DNA, 23 bp, Artificial Sequence
  Description of Artificial Sequence: Synthetic oligonucleotide
cttcaggcctacctagcccaggc

SEQ ID NO: 4502 - DNA, 25 bp, Artificial Sequence
  Description of Artificial Sequence: Synthetic oligonucleotide
tgctcctataccctggtcaacattg

SEQ ID NO: 4503 - DNA, 24 bp, Artificial Sequence
  Description of Artificial Sequence: Synthetic oligonucleotide
ctgggaccatagtccccttcaatg

SEQ ID NO: 4504 - DNA, 24 bp, Artificial Sequence
  Description of Artificial Sequence: Synthetic oligonucleotide
cgtctcagcccgtgaaaaaaactc

SEQ ID NO: 4505 - DNA, 23 bp, Artificial Sequence
  Description of Artificial Sequence: Synthetic oligonucleotide
ccttgtgaatcccatcctggaag

SEQ ID NO: 4506 - DNA, 25 bp, Artificial Sequence
  Description of Artificial Sequence: Synthetic oligonucleotide
gcctccttaatgccagtggtaacag

SEQ ID NO: 4507 - DNA, 25 bp, Artificial Sequence
  Description of Artificial Sequence: Synthetic oligonucleotide
gactcaatcttccttcctcttgccg

SEQ ID NO: 4508 - DNA, 23 bp, Artificial Sequence
  Description of Artificial Sequence: Synthetic oligonucleotide
gggtctctgcccttgtctttgcc

SEQ ID NO: 4509 - DNA, 25 bp, Artificial Sequence
  Description of Artificial Sequence: Synthetic oligonucleotide
ctgcttccttctttacttccctggg

SEQ ID NO: 4510 - DNA, 24 bp, Artificial Sequence
  Description of Artificial Sequence: Synthetic oligonucleotide
cacacacctacatcctgccaagaa

SEQ ID NO: 4511 - DNA, 24 bp, Artificial Sequence
  Description of Artificial Sequence: Synthetic oligonucleotide
agaacacaggctctgctgtcaagc

SEQ ID NO: 4512 - DNA, 26 bp, Artificial Sequence
  Description of Artificial Sequence: Synthetic oligonucleotide
cagatgcacctatttcatggttcagg

SEQ ID NO: 4513 - DNA, 21 bp, Artificial Sequence
  Description of Artificial Sequence: Synthetic oligonucleotide
aggaacaggacccctgccaag

SEQ ID NO: 4514 - DNA, 22 bp, Artificial Sequence
  Description of Artificial Sequence: Synthetic oligonucleotide
cctcctcaggaaggtcgggacg

SEQ ID NO: 4515 - DNA, 25 bp, Artificial Sequence
  Description of Artificial Sequence: Synthetic oligonucleotide
tgaggaaaagagaatgatgggaaag

SEQ ID NO: 4516 - DNA, 26 bp, Artificial Sequence
  Description of Artificial Sequence: Synthetic oligonucleotide
tgcctctgagtcattgtgtttttcag

SEQ ID NO: 4517 - DNA, 25 bp, Artificial Sequence
  Description of Artificial Sequence: Synthetic oligonucleotide
gttctggcagttgactttcctgacc

SEQ ID NO: 4518 - DNA, 23 bp, Artificial Sequence
  Description of Artificial Sequence: Synthetic oligonucleotide
acgttgaagcagccttgcattcc

SEQ ID NO: 4519 - DNA, 22 bp, Artificial Sequence
  Description of Artificial Sequence: Synthetic oligonucleotide
agggggcttgaccttcaaggag

SEQ ID NO: 4520 - DNA, 24 bp, Artificial Sequence
  Description of Artificial Sequence: Synthetic oligonucleotide
gcattctgtggggctgtctaaaag

SEQ ID NO: 4521 - DNA, 22 bp, Artificial Sequence
  Description of Artificial Sequence: Synthetic oligonucleotide
aggggaatgggggtgcttagag

SEQ ID NO: 4522 - DNA, 25 bp, Artificial Sequence
  Description of Artificial Sequence: Synthetic oligonucleotide
tcatgtttttttggccacatgtacg

SEQ ID NO: 4523 - DNA, 25 bp, Artificial Sequence
  Description of Artificial Sequence: Synthetic oligonucleotide
ttttagtccctctgcttccctcttc

SEQ ID NO: 4524 - DNA, 21 bp, Artificial Sequence
  Description of Artificial Sequence: Synthetic oligonucleotide
gaagcctttgcttggcccttg

SEQ ID NO: 4525 - DNA, 25 bp, Artificial Sequence
  Description of Artificial Sequence: Synthetic oligonucleotide
gcaggcacatcagaataggagagac

SEQ ID NO: 4526 - DNA, 25 bp, Artificial Sequence
  Description of Artificial Sequence: Synthetic oligonucleotide
ccctgtgaaaatgagattgcattcc

SEQ ID NO: 4527 - DNA, 25 bp, Artificial Sequence
  Description of Artificial Sequence: Synthetic oligonucleotide
gtgtttcctgcactcatcttgtgac

SEQ ID NO: 4528 - DNA, 24 bp, Artificial Sequence
  Description of Artificial Sequence: Synthetic oligonucleotide
ctgcttggtcttcagggaatcaac

SEQ ID NO: 4529 - DNA, 26 bp, Artificial Sequence
  Description of Artificial Sequence: Synthetic oligonucleotide
ccaacggctctaccaagatgattatg

SEQ ID NO: 4530 - DNA, 26 bp, Artificial Sequence
  Description of Artificial Sequence: Synthetic oligonucleotide
cccaggcagagtattcaaaattttga

SEQ ID NO: 4531 - DNA, 23 bp, Artificial Sequence
  Description of Artificial Sequence: Synthetic oligonucleotide
ctgagcagggtctttggaatcac

SEQ ID NO: 4532 - DNA, 26 bp, Artificial Sequence
  Description of Artificial Sequence: Synthetic oligonucleotide
tcagccaacacatctagcttagcatg

SEQ ID NO: 4533 - DNA, 21 bp, Artificial Sequence
  Description of Artificial Sequence: Synthetic oligonucleotide
ccctcccatctacccaccccc

SEQ ID NO: 4534 - DNA, 26 bp, Artificial Sequence
  Description of Artificial Sequence: Synthetic oligonucleotide
catttgggtgcgctaaatctttatcc

SEQ ID NO: 4535 - DNA, 25 bp, Artificial Sequence
  Description of Artificial Sequence: Synthetic oligonucleotide
cagtgaatgccccatgtaaaaacac

SEQ ID NO: 4536 - DNA, 25 bp, Artificial Sequence
  Description of Artificial Sequence: Synthetic oligonucleotide
aggtcagaagggtgtttgctgttac

SEQ ID NO: 4537 - DNA, 25 bp, Artificial Sequence
  Description of Artificial Sequence: Synthetic oligonucleotide
tgatgctttggctcttggagtatcg

SEQ ID NO: 4538 - DNA, 25 bp, Artificial Sequence
  Description of Artificial Sequence: Synthetic oligonucleotide
gctgccaaaaagctgactcttcttg

SEQ ID NO: 4539 - DNA, 26 bp, Artificial Sequence
  Description of Artificial Sequence: Synthetic oligonucleotide
ccctggatttggagatctctcctacg

SEQ ID NO: 4540 - DNA, 26 bp, Artificial Sequence
  Description of Artificial Sequence: Synthetic oligonucleotide
ccaaattaaacccacccttcaaagag

SEQ ID NO: 4541 - DNA, 25 bp, Artificial Sequence
  Description of Artificial Sequence: Synthetic oligonucleotide
aactggggcacctgttcaattagtc

SEQ ID NO: 4542 - DNA, 26 bp, Artificial Sequence
  Description of Artificial Sequence: Synthetic oligonucleotide
tgggtgaggggagattatatagtgcc

SEQ ID NO: 4543 - DNA, 25 bp, Artificial Sequence
  Description of Artificial Sequence: Synthetic oligonucleotide
aaagtgcacaatgcagtgacaattc

SEQ ID NO: 4544 - DNA, 22 bp, Artificial Sequence
  Description of Artificial Sequence: Synthetic oligonucleotide
tccactggcctcatttccacac

SEQ ID NO: 4545 - DNA, 23 bp, Artificial Sequence
  Description of Artificial Sequence: Synthetic oligonucleotide
aacctcaaagaatgcaggcagga

SEQ ID NO: 4546 - DNA, 22 bp, Artificial Sequence
  Description of Artificial Sequence: Synthetic oligonucleotide
agcctgggctaggtgtctgccc

SEQ ID NO: 4547 - DNA, 23 bp, Artificial Sequence
  Description of Artificial Sequence: Synthetic oligonucleotide
gattgctttgatgctgggtcaag

SEQ ID NO: 4548 - DNA, 20 bp, Artificial Sequence
  Description of Artificial Sequence: Synthetic oligonucleotide
ggtgggcaggtgacagggtc

SEQ ID NO: 4549 - DNA, 26 bp, Artificial Sequence
  Description of Artificial Sequence: Synthetic oligonucleotide
ggaatgttaaatggttcagcctctgc

SEQ ID NO: 4550 - DNA, 26 bp, Artificial Sequence
  Description of Artificial Sequence: Synthetic oligonucleotide
cagacaccaagggctcttatgaatcc

SEQ ID NO: 4551 - DNA, 26 bp, Artificial Sequence
  Description of Artificial Sequence: Synthetic oligonucleotide
tgagatttgtgtggggacataaaacc

SEQ ID NO: 4552 - DNA, 24 bp, Artificial Sequence
  Description of Artificial Sequence: Synthetic oligonucleotide
tgatctggagttacctgaggccac

SEQ ID NO: 4553 - DNA, 26 bp, Artificial Sequence
  Description of Artificial Sequence: Synthetic oligonucleotide
tgagtgtggctcttccataactgttg

SEQ ID NO: 4554 - DNA, 22 bp, Artificial Sequence
  Description of Artificial Sequence: Synthetic oligonucleotide
acagagccttgggtgctgcagg

SEQ ID NO: 4555 - DNA, 23 bp, Artificial Sequence
  Description of Artificial Sequence: Synthetic oligonucleotide
ccactgcacccaaacttcctttc

SEQ ID NO: 4556 - DNA, 21 bp, Artificial Sequence
  Description of Artificial Sequence: Synthetic oligonucleotide
ggagggaaagccctaccaccc

SEQ ID NO: 4557 - DNA, 23 bp, Artificial Sequence
  Description of Artificial Sequence: Synthetic oligonucleotide
tgttgcataggaaggctctggga

SEQ ID NO: 4558 - DNA, 24 bp, Artificial Sequence
  Description of Artificial Sequence: Synthetic oligonucleotide
ctgatctctgtttcctttgccgac

SEQ ID NO: 4559 - DNA, 23 bp, Artificial Sequence
  Description of Artificial Sequence: Synthetic oligonucleotide
gtttcacttctcccaacctgcgt

SEQ ID NO: 4560 - DNA, 23 bp, Artificial Sequence
  Description of Artificial Sequence: Synthetic oligonucleotide
gtttggacagtgtgtgcccagag

SEQ ID NO: 4561 - DNA, 25 bp, Artificial Sequence
  Description of Artificial Sequence: Synthetic oligonucleotide
caaatgtgtatggaagggtggactc

SEQ ID NO: 4562 - DNA, 22 bp, Artificial Sequence
  Description of Artificial Sequence: Synthetic oligonucleotide
cttccccttcctgggatctgcc

SEQ ID NO: 4563 - DNA, 24 bp, Artificial Sequence
  Description of Artificial Sequence: Synthetic oligonucleotide
caccaaaaattccacccaagatca

SEQ ID NO: 4564 - DNA, 22 bp, Artificial Sequence
  Description of Artificial Sequence: Synthetic oligonucleotide
cccagcccagacatttctcctg

SEQ ID NO: 4565 - DNA, 26 bp, Artificial Sequence
  Description of Artificial Sequence: Synthetic oligonucleotide
tgtgacagtaacagaaagtgcccagc

SEQ ID NO: 4566 - DNA, 24 bp, Artificial Sequence
  Description of Artificial Sequence: Synthetic oligonucleotide
gaccctcatcagaaatcctgacga

SEQ ID NO: 4567 - DNA, 26 bp, Artificial Sequence
  Description of Artificial Sequence: Synthetic oligonucleotide
tgctttagtgagctcagcttctctgc

SEQ ID NO: 4568 - DNA, 22 bp, Artificial Sequence
  Description of Artificial Sequence: Synthetic oligonucleotide
atggagaaggggcaggaacaag

SEQ ID NO: 4569 - DNA, 21 bp, Artificial Sequence
  Description of Artificial Sequence: Synthetic oligonucleotide
caggttggaagacctccccag

SEQ ID NO: 4570 - DNA, 26 bp, Artificial Sequence
  Description of Artificial Sequence: Synthetic oligonucleotide
cgtggggttcatgatttagatcacag

SEQ ID NO: 4571 - DNA, 26 bp, Artificial Sequence
  Description of Artificial Sequence: Synthetic oligonucleotide
tcgccttcatattcaatctgtgttcc

SEQ ID NO: 4572 - DNA, 23 bp, Artificial Sequence
  Description of Artificial Sequence: Synthetic oligonucleotide
catcaaagactggagcgacgttg

SEQ ID NO: 4573 - DNA, 25 bp, Artificial Sequence
  Description of Artificial Sequence: Synthetic oligonucleotide
tgggaaatgaccctttttcctacag

SEQ ID NO: 4574 - DNA, 26 bp, Artificial Sequence
  Description of Artificial Sequence: Synthetic oligonucleotide
ccctagtgaaagctacagatttgccg

SEQ ID NO: 4575 - DNA, 23 bp, Artificial Sequence
  Description of Artificial Sequence: Synthetic oligonucleotide
tgggaatttagtccccaggtggg

SEQ ID NO: 4576 - DNA, 24 bp, Artificial Sequence
  Description of Artificial Sequence: Synthetic oligonucleotide
tgatgagggaagggcatatgcttg

SEQ ID NO: 4577 - DNA, 26 bp, Artificial Sequence
  Description of Artificial Sequence: Synthetic oligonucleotide
tgatgtggtaggtggaaatggttaac

SEQ ID NO: 4578 - DNA, 20 bp, Artificial Sequence
  Description of Artificial Sequence: Synthetic oligonucleotide
acgtgatctggcccttgccc

SEQ ID NO: 4579 - DNA, 24 bp, Artificial Sequence
  Description of Artificial Sequence: Synthetic oligonucleotide
ccgctctgtaaacaccaactcccg

SEQ ID NO: 4580 - DNA, 24 bp, Artificial Sequence
  Description of Artificial Sequence: Synthetic oligonucleotide
gatttgatgcagcagccttatgag

SEQ ID NO: 4581 - DNA, 20 bp, Artificial Sequence
  Description of Artificial Sequence: Synthetic oligonucleotide
gcacagtccctcccacgtcc

SEQ ID NO: 4582 - DNA, 20 bp, Artificial Sequence
  Description of Artificial Sequence: Synthetic oligonucleotide
ccagggatttctggctcgcg

SEQ ID NO: 4583 - DNA, 23 bp, Artificial Sequence
  Description of Artificial Sequence: Synthetic oligonucleotide
agtggagacgcaatctcccttgg

SEQ ID NO: 4584 - DNA, 23 bp, Artificial Sequence
  Description of Artificial Sequence: Synthetic oligonucleotide
ctctccccaagcagaacccattg

SEQ ID NO: 4585 - DNA, 25 bp, Artificial Sequence
  Description of Artificial Sequence: Synthetic oligonucleotide
tcctaacaccgtggtagaatccttg

SEQ ID NO: 4586 - DNA, 24 bp, Artificial Sequence
  Description of Artificial Sequence: Synthetic oligonucleotide
cccaaaacagaacaggctgaaatg

SEQ ID NO: 4587 - DNA, 26 bp, Artificial Sequence
  Description of Artificial Sequence: Synthetic oligonucleotide
gaggaacctcctagtcttggaacctc

SEQ ID NO: 4588 - DNA, 25 bp, Artificial Sequence
  Description of Artificial Sequence: Synthetic oligonucleotide
cattggtcaggtctatgctgtgttc

SEQ ID NO: 4589 - DNA, 27 bp, Artificial Sequence
  Description of Artificial Sequence: Synthetic oligonucleotide
caatctgtacctgcagaagcctgatac

SEQ ID NO: 4590 - DNA, 23 bp, Artificial Sequence
  Description of Artificial Sequence: Synthetic oligonucleotide
cccactcccaccttgttctaccc

SEQ ID NO: 4591 - DNA, 22 bp, Artificial Sequence
  Description of Artificial Sequence: Synthetic oligonucleotide
ccacaggaggcatcctgaaggc

SEQ ID NO: 4592 - DNA, 22 bp, Artificial Sequence
  Description of Artificial Sequence: Synthetic oligonucleotide
gtggccacaggaacatggacag

SEQ ID NO: 4593 - DNA, 24 bp, Artificial Sequence
  Description of Artificial Sequence: Synthetic oligonucleotide
gggaccacactcttgccttcctag

SEQ ID NO: 4594 - DNA, 24 bp, Artificial Sequence
  Description of Artificial Sequence: Synthetic oligonucleotide
gtgatcagaatgagtcagggtgga

SEQ ID NO: 4595 - DNA, 26 bp, Artificial Sequence
  Description of Artificial Sequence: Synthetic oligonucleotide
cagcagaaagatttctgtccatcacg

SEQ ID NO: 4596 - DNA, 25 bp, Artificial Sequence
  Description of Artificial Sequence: Synthetic oligonucleotide
ccagtgacaccaaggcactctacag

SEQ ID NO: 4597 - DNA, 25 bp, Artificial Sequence
  Description of Artificial Sequence: Synthetic oligonucleotide
aaaacagagagagaggtgggaggag

SEQ ID NO: 4598 - DNA, 26 bp, Artificial Sequence
  Description of Artificial Sequence: Synthetic oligonucleotide
ttgagagttctctgggaagcatagag

SEQ ID NO: 4599 - DNA, 25 bp, Artificial Sequence
  Description of Artificial Sequence: Synthetic oligonucleotide
cagaggacatcactccaggacttgt

SEQ ID NO: 4600 - DNA, 27 bp, Artificial Sequence
  Description of Artificial Sequence: Synthetic oligonucleotide
gaatttagtgaaatcaccagagcctgg

SEQ ID NO: 4601 - DNA, 23 bp, Artificial Sequence
  Description of Artificial Sequence: Synthetic oligonucleotide
ttgtggcatggcctagaaaacag

SEQ ID NO: 4602 - DNA, 25 bp, Artificial Sequence
  Description of Artificial Sequence: Synthetic oligonucleotide
gccaatgtgacaagctctttgtttc

SEQ ID NO: 4603 - DNA, 24 bp, Artificial Sequence
  Description of Artificial Sequence: Synthetic oligonucleotide
ccctgtggttcagcttcttgaacg

SEQ ID NO: 4604 - DNA, 25 bp, Artificial Sequence
  Description of Artificial Sequence: Synthetic oligonucleotide
ctgagaaaagcagtgatatgccctg

SEQ ID NO: 4605 - DNA, 25 bp, Artificial Sequence
  Description of Artificial Sequence: Synthetic oligonucleotide
tttgcattatgaaaatccaggtcag

SEQ ID NO: 4606 - DNA, 26 bp, Artificial Sequence
  Description of Artificial Sequence: Synthetic oligonucleotide
tgtcaagtaactcaattcctcagcat

SEQ ID NO: 4607 - DNA, 22 bp, Artificial Sequence
  Description of Artificial Sequence: Synthetic oligonucleotide
aggcttcaatggagcgcaaaag

SEQ ID NO: 4608 - DNA, 22 bp, Artificial Sequence
  Description of Artificial Sequence: Synthetic oligonucleotide
attcggggtccttgacttcccg

SEQ ID NO: 4609 - DNA, 22 bp, Artificial Sequence
  Description of Artificial Sequence: Synthetic oligonucleotide
cctcgccttttacccttccctg

SEQ ID NO: 4610 - DNA, 26 bp, Artificial Sequence
  Description of Artificial Sequence: Synthetic oligonucleotide
tgaaaatggacagacttaaacccaac

SEQ ID NO: 4611 - DNA, 26 bp, Artificial Sequence
  Description of Artificial Sequence: Synthetic oligonucleotide
ggagtacagtgacctgaacatggctc

SEQ ID NO: 4612 - DNA, 25 bp, Artificial Sequence
  Description of Artificial Sequence: Synthetic oligonucleotide
agaggctctagtagcagctttgcag

SEQ ID NO: 4613 - DNA, 27 bp, Artificial Sequence
  Description of Artificial Sequence: Synthetic oligonucleotide
cagttggcatggtagaacttctaggac

SEQ ID NO: 4614 - DNA, 27 bp, Artificial Sequence
  Description of Artificial Sequence: Synthetic oligonucleotide
cgtggggtaggagaaacaggtataacg

SEQ ID NO: 4615 - DNA, 26 bp, Artificial Sequence
  Description of Artificial Sequence: Synthetic oligonucleotide
gctcaggagtgaagctacagagcttc

SEQ ID NO: 4616 - DNA, 26 bp, Artificial Sequence
  Description of Artificial Sequence: Synthetic oligonucleotide
aaaggaaaagaggctagaagggaagg

SEQ ID NO: 4617 - DNA, 27 bp, Artificial Sequence
  Description of Artificial Sequence: Synthetic oligonucleotide
ttttaacttctgtgatccctgtagccg

SEQ ID NO: 4618 - DNA, 25 bp, Artificial Sequence
  Description of Artificial Sequence: Synthetic oligonucleotide
ggggagccacatgtgagaaagtatg

SEQ ID NO: 4619 - DNA, 19 bp, Artificial Sequence
  Description of Artificial Sequence: Synthetic oligonucleotide
gagggtccgccgtgctctc

SEQ ID NO: 4620 - DNA, 27 bp, Artificial Sequence
  Description of Artificial Sequence: Synthetic oligonucleotide
cactttctatctcatttcatgaggccg

SEQ ID NO: 4621 - DNA, 27 bp, Artificial Sequence
  Description of Artificial Sequence: Synthetic oligonucleotide
tctgaggccttattgtaacaaaatggc

SEQ ID NO: 4622 - DNA, 20 bp, Artificial Sequence
  Description of Artificial Sequence: Synthetic oligonucleotide
ctcacatgcaaggggagggg

SEQ ID NO: 4623 - DNA, 26 bp, Artificial Sequence
  Description of Artificial Sequence: Synthetic oligonucleotide
tctcatgtggtggttgagaaaactgg

SEQ ID NO: 4624 - DNA, 23 bp, Artificial Sequence
  Description of Artificial Sequence: Synthetic oligonucleotide
tacctggaggctgccatgacacc

SEQ ID NO: 4625 - DNA, 27 bp, Artificial Sequence
  Description of Artificial Sequence: Synthetic oligonucleotide
ttctagaatgtaatggacgtgcagtcg

SEQ ID NO: 4626 - DNA, 26 bp, Artificial Sequence
  Description of Artificial Sequence: Synthetic oligonucleotide
gtttttcaaatcttgctagtgagccg

SEQ ID NO: 4627 - DNA, 24 bp, Artificial Sequence
  Description of Artificial Sequence: Synthetic oligonucleotide
tctctgaggagagcttgggaaggc

SEQ ID NO: 4628 - DNA, 25 bp, Artificial Sequence
  Description of Artificial Sequence: Synthetic oligonucleotide
ccagacgtttatcttgctgaggctc

SEQ ID NO: 4629 - DNA, 25 bp, Artificial Sequence
  Description of Artificial Sequence: Synthetic oligonucleotide
ttaagagggagccaaagtgaggtag

SEQ ID NO: 4630 - DNA, 28 bp, Artificial Sequence
  Description of Artificial Sequence: Synthetic oligonucleotide
cccaaatgcctatcaatgaaagactagg

SEQ ID NO: 4631 - DNA, 27 bp, Artificial Sequence
  Description of Artificial Sequence: Synthetic oligonucleotide
ggacaagaaatgccacattttaaaaac

SEQ ID NO: 4632 - DNA, 28 bp, Artificial Sequence
  Description of Artificial Sequence: Synthetic oligonucleotide
gaaactgtgggagatgatgaatatttgc

SEQ ID NO: 4633 - DNA, 22 bp, Artificial Sequence
  Description of Artificial Sequence: Synthetic oligonucleotide
aagcaaacccgtccttcttcac

SEQ ID NO: 4634 - DNA, 23 bp, Artificial Sequence
  Description of Artificial Sequence: Synthetic oligonucleotide
cttgggggaagcatcaggagatg

SEQ ID NO: 4635 - DNA, 27 bp, Artificial Sequence
  Description of Artificial Sequence: Synthetic oligonucleotide
tgaatttgtctaggtgttagattggcc

SEQ ID NO: 4636 - DNA, 24 bp, Artificial Sequence
  Description of Artificial Sequence: Synthetic oligonucleotide
actgggtactacatctcccaggcg

SEQ ID NO: 4637 - DNA, 27 bp, Artificial Sequence
  Description of Artificial Sequence: Synthetic oligonucleotide
aacaaatttgataaaatccaacacccg

SEQ ID NO: 4638 - DNA, 19 bp, Artificial Sequence
  Description of Artificial Sequence: Synthetic oligonucleotide
ccgcctggacaccgagctc

SEQ ID NO: 4639 - DNA, 26 bp, Artificial Sequence
  Description of Artificial Sequence: Synthetic oligonucleotide
aatccatgaggttcacatggacttac

SEQ ID NO: 4640 - DNA, 22 bp, Artificial Sequence
  Description of Artificial Sequence: Synthetic oligonucleotide
gagcgaaaccgcctctcaaaca

SEQ ID NO: 4641 - DNA, 24 bp, Artificial Sequence
  Description of Artificial Sequence: Synthetic oligonucleotide
ctctctctccctcgtgagaaagag

SEQ ID NO: 4642 - DNA, 20 bp, Artificial Sequence
  Description of Artificial Sequence: Synthetic oligonucleotide
ctcagccagggctgcatgcg

SEQ ID NO: 4643 - DNA, 26 bp, Artificial Sequence
  Description of Artificial Sequence: Synthetic oligonucleotide
tctttgagactcaaatttgccatttg

SEQ ID NO: 4644 - DNA, 19 bp, Artificial Sequence
  Description of Artificial Sequence: Synthetic oligonucleotide
acgtcgctgtcgaagcgcg

SEQ ID NO: 4645 - DNA, 28 bp, Artificial Sequence
  Description of Artificial Sequence: Synthetic oligonucleotide
caaaacattttcatcaactgatcaacat

SEQ ID NO: 4646 - DNA, 23 bp, Artificial Sequence
  Description of Artificial Sequence: Synthetic oligonucleotide
gtcaaagatcaaggcctgggaag

SEQ ID NO: 4647 - DNA, 28 bp, Artificial Sequence
  Description of Artificial Sequence: Synthetic oligonucleotide
catcttatataagagccaacatgtgcac

SEQ ID NO: 4648 - DNA, 24 bp, Artificial Sequence
  Description of Artificial Sequence: Synthetic oligonucleotide
tcatgaccatctctatggccaatc

SEQ ID NO: 4649 - DNA, 24 bp, Artificial Sequence
  Description of Artificial Sequence: Synthetic oligonucleotide
tttcctaatggccctgatcctgtc

SEQ ID NO: 4650 - DNA, 28 bp, Artificial Sequence
  Description of Artificial Sequence: Synthetic oligonucleotide
tgtcccttaatcttgtgtgaacttttta

SEQ ID NO: 4651 - DNA, 28 bp, Artificial Sequence
  Description of Artificial Sequence: Synthetic oligonucleotide
ggagagtgatctattggttaggagcacg

SEQ ID NO: 4652 - DNA, 21 bp, Artificial Sequence
  Description of Artificial Sequence: Synthetic oligonucleotide
ttggggttttgagccgcagtg

SEQ ID NO: 4653 - DNA, 27 bp, Artificial Sequence
  Description of Artificial Sequence: Synthetic oligonucleotide
ttattttaaggaagtgaaaccccttcg

SEQ ID NO: 4654 - DNA, 18 bp, Artificial Sequence
  Description of Artificial Sequence: Synthetic oligonucleotide
cccggagcagccctgatc

SEQ ID NO: 4655 - DNA, 27 bp, Artificial Sequence
  Description of Artificial Sequence: Synthetic oligonucleotide
tgacagtgttgaaagattccagttaac

SEQ ID NO: 4656 - DNA, 29 bp, Artificial Sequence
  Description of Artificial Sequence: Synthetic oligonucleotide
ggaagttgtggtctgctattggttataag

SEQ ID NO: 4657 - DNA, 27 bp, Artificial Sequence
  Description of Artificial Sequence: Synthetic oligonucleotide
gccagtgattattccactctctactgc

SEQ ID NO: 4658 - DNA, 18 bp, Artificial Sequence
  Description of Artificial Sequence: Synthetic oligonucleotide
gcctgctgcccagccacc

SEQ ID NO: 4659 - DNA, 27 bp, Artificial Sequence
  Description of Artificial Sequence: Synthetic oligonucleotide
agaagagaactaaatggacagagggaa

SEQ ID NO: 4660 - DNA, 22 bp, Artificial Sequence
  Description of Artificial Sequence: Synthetic oligonucleotide
gaaaagactgtggtccggtggg

SEQ ID NO: 4661 - DNA, 21 bp, Artificial Sequence
  Description of Artificial Sequence: Synthetic oligonucleotide
ttagttctcccgggccagccg

SEQ ID NO: 4662 - DNA, 24 bp, Artificial Sequence
  Description of Artificial Sequence: Synthetic oligonucleotide
aggccatcgccaatcattgtatac

SEQ ID NO: 4663 - DNA, 22 bp, Artificial Sequence
  Description of Artificial Sequence: Synthetic oligonucleotide
gagttgtctgcatttcccccat

SEQ ID NO: 4664 - DNA, 29 bp, Artificial Sequence
  Description of Artificial Sequence: Synthetic oligonucleotide
gccaactttcaatgttaattagttgtgga

SEQ ID NO: 4665 - DNA, 27 bp, Artificial Sequence
  Description of Artificial Sequence: Synthetic oligonucleotide
agtcatttttccacatcatttgactac

SEQ ID NO: 4666 - DNA, 28 bp, Artificial Sequence
  Description of Artificial Sequence: Synthetic oligonucleotide
tcaacatgctcccttaagtaattctgaa

SEQ ID NO: 4667 - DNA, 21 bp, Artificial Sequence
  Description of Artificial Sequence: Synthetic oligonucleotide
cagccctcaggtgagtgggag

SEQ ID NO: 4668 - DNA, 23 bp, Artificial Sequence
  Description of Artificial Sequence: Synthetic oligonucleotide
gaacatcaatggatcggtgtgag

SEQ ID NO: 4669 - DNA, 27 bp, Artificial Sequence
  Description of Artificial Sequence: Synthetic oligonucleotide
cagctcacaaaacagaatagttcagtc

SEQ ID NO: 4670 - DNA, 19 bp, Artificial Sequence
  Description of Artificial Sequence: Synthetic oligonucleotide
agctgctgcgagggtccgc

SEQ ID NO: 4671 - DNA, 24 bp, Artificial Sequence
  Description of Artificial Sequence: Synthetic oligonucleotide
caccaatatcatccccccaaaatg

SEQ ID NO: 4672 - DNA, 24 bp, Artificial Sequence
  Description of Artificial Sequence: Synthetic oligonucleotide
aaagtggacacaccatgactggag

SEQ ID NO: 4673 - DNA, 24 bp, Artificial Sequence
  Description of Artificial Sequence: Synthetic oligonucleotide
ccctcctaccccaactgctagaag

SEQ ID NO: 4674 - DNA, 24 bp, Artificial Sequence
  Description of Artificial Sequence: Synthetic oligonucleotide
cctgttccaacaagtctgttgggg

SEQ ID NO: 4675 - DNA, 22 bp, Artificial Sequence
  Description of Artificial Sequence: Synthetic oligonucleotide
cgtaggcacccaagggaatctg

SEQ ID NO: 4676 - DNA, 20 bp, Artificial Sequence
  Description of Artificial Sequence: Synthetic oligonucleotide
cccaccggggtcaaggaacc

SEQ ID NO: 4677 - DNA, 20 bp, Artificial Sequence
  Description of Artificial Sequence: Synthetic oligonucleotide
ccagctgcttgcccaggtcg

SEQ ID NO: 4678 - DNA, 22 bp, Artificial Sequence
  Description of Artificial Sequence: Synthetic oligonucleotide
cttgctggagatgctgcagagg

SEQ ID NO: 4679 - DNA, 21 bp, Artificial Sequence
  Description of Artificial Sequence: Synthetic oligonucleotide
cccaaatccttccacagggac

SEQ ID NO: 4680 - DNA, 25 bp, Artificial Sequence
  Description of Artificial Sequence: Synthetic oligonucleotide
tgttatcacaactgtgcagcctccc

SEQ ID NO: 4681 - DNA, 21 bp, Artificial Sequence
  Description of Artificial Sequence: Synthetic oligonucleotide
caaatggcggctccatcttca

SEQ ID NO: 4682 - DNA, 27 bp, Artificial Sequence
  Description of Artificial Sequence: Synthetic oligonucleotide
tgcatgattatatgtgtttgcaaaaag

SEQ ID NO: 4683 - DNA, 18 bp, Artificial Sequence
  Description of Artificial Sequence: Synthetic oligonucleotide
gcccggtgtccaccgtgg

SEQ ID NO: 4684 - DNA, 21 bp, Artificial Sequence
  Description of Artificial Sequence: Synthetic oligonucleotide
accagtaacggtcgcgacccg

SEQ ID NO: 4685 - DNA, 29 bp, Artificial Sequence
  Description of Artificial Sequence: Synthetic oligonucleotide
tttctagacagttgccttatcaaataccg

SEQ ID NO: 4686 - DNA, 27 bp, Artificial Sequence
  Description of Artificial Sequence: Synthetic oligonucleotide
cagccaacaaacataggaaaaaattcg

SEQ ID NO: 4687 - DNA, 29 bp, Artificial Sequence
  Description of Artificial Sequence: Synthetic oligonucleotide
aaattaattaggatgacacatgatggatg

SEQ ID NO: 4688 - DNA, 22 bp, Artificial Sequence
  Description of Artificial Sequence: Synthetic oligonucleotide
actttcttccgcctggccagac

SEQ ID NO: 4689 - DNA, 22 bp, Artificial Sequence
  Description of Artificial Sequence: Synthetic oligonucleotide
cccatccttaccggagtgtgcg

SEQ ID NO: 4690 - DNA, 20 bp, Artificial Sequence
  Description of Artificial Sequence: Synthetic oligonucleotide
ggggcagatgggatgctcag

SEQ ID NO: 4691 - DNA, 21 bp, Artificial Sequence
  Description of Artificial Sequence: Synthetic oligonucleotide
ggctcctcgaggacagggacc

SEQ ID NO: 4692 - DNA, 29 bp, Artificial Sequence
  Description of Artificial Sequence: Synthetic oligonucleotide
aagcacttgcttatatgttattctctccc

SEQ ID NO: 4693 - DNA, 26 bp, Artificial Sequence
  Description of Artificial Sequence: Synthetic oligonucleotide
tcattcagtgtcataagtcagtgcac

SEQ ID NO: 4694 - DNA, 26 bp, Artificial Sequence
  Description of Artificial Sequence: Synthetic oligonucleotide
tctttgctttcactatcctatggccc

SEQ ID NO: 4695 - DNA, 27 bp, Artificial Sequence
  Description of Artificial Sequence: Synthetic oligonucleotide
tcacagctttgcctctttttttttttg

SEQ ID NO: 4696 - DNA, 21 bp, Artificial Sequence
  Description of Artificial Sequence: Synthetic oligonucleotide
ccctagcagggagctgagcac

SEQ ID NO: 4697 - DNA, 28 bp, Artificial Sequence
  Description of Artificial Sequence: Synthetic oligonucleotide
tcttaactgaaatccaagttccaataat

SEQ ID NO: 4698 - DNA, 25 bp, Artificial Sequence
  Description of Artificial Sequence: Synthetic oligonucleotide
aggcaacaaccttgatcttggactg

SEQ ID NO: 4699 - DNA, 19 bp, Artificial Sequence
  Description of Artificial Sequence: Synthetic oligonucleotide
ggaaccgcaccaactggcg

SEQ ID NO: 4700 - DNA, 30 bp, Artificial Sequence
  Description of Artificial Sequence: Synthetic oligonucleotide
tgatttcttaaggtaagtttcacattcctg

SEQ ID NO: 4701 - DNA, 21 bp, Artificial Sequence
  Description of Artificial Sequence: Synthetic oligonucleotide
cagaggccttttcccctcccc

SEQ ID NO: 4702 - DNA, 30 bp, Artificial Sequence
  Description of Artificial Sequence: Synthetic oligonucleotide
aaaatattgaaaatctcagctcaaaataac

SEQ ID NO: 4703 - DNA, 18 bp, Artificial Sequence
  Description of Artificial Sequence: Synthetic oligonucleotide
ccccgggcttcttgcacc

SEQ ID NO: 4704 - DNA, 29 bp, Artificial Sequence
  Description of Artificial Sequence: Synthetic oligonucleotide
ttgctgtgcagcatattcttatatacatg

SEQ ID NO: 4705 - DNA, 29 bp, Artificial Sequence
  Description of Artificial Sequence: Synthetic oligonucleotide
cacaaaagaaataaataaaaggcatccag

SEQ ID NO: 4706 - DNA, 30 bp, Artificial Sequence
  Description of Artificial Sequence: Synthetic oligonucleotide
catctttttcaagagtcaagattacaatac

SEQ ID NO: 4707 - DNA, 19 bp, Artificial Sequence
  Description of Artificial Sequence: Synthetic oligonucleotide
agaggctcctcggggggcc

SEQ ID NO: 4708 - DNA, 20 bp, Artificial Sequence
  Description of Artificial Sequence: Synthetic oligonucleotide
ccctgctctctgtcggctcg

SEQ ID NO: 4709 - DNA, 28 bp, Artificial Sequence
  Description of Artificial Sequence: Synthetic oligonucleotide
agaaatttgacaaaagattacaggaacc

SEQ ID NO: 4710 - DNA, 21 bp, Artificial Sequence
  Description of Artificial Sequence: Synthetic oligonucleotide
gaggcccaaggcaacagttcc

SEQ ID NO: 4711 - DNA, 29 bp, Artificial Sequence
  Description of Artificial Sequence: Synthetic oligonucleotide
gcatggtgctatatttattgatgatgatg

SEQ ID NO: 4712 - DNA, 21 bp, Artificial Sequence
  Description of Artificial Sequence: Synthetic oligonucleotide
ccaagaacacaggcctccccc

SEQ ID NO: 4713 - DNA, 25 bp, Artificial Sequence
  Description of Artificial Sequence: Synthetic oligonucleotide
ggaagggacaacatgtaagctcagg

SEQ ID NO: 4714 - DNA, 26 bp, Artificial Sequence
  Description of Artificial Sequence: Synthetic oligonucleotide
tcccaattccctagttgttttttctg

SEQ ID NO: 4715 - DNA, 22 bp, Artificial Sequence
  Description of Artificial Sequence: Synthetic oligonucleotide
ccgggcagaacctaactcctcc

SEQ ID NO: 4716 - DNA, 22 bp, Artificial Sequence
  Description of Artificial Sequence: Synthetic oligonucleotide
catctcgagcctccgttcaaat

SEQ ID NO: 4717 - DNA, 23 bp, Artificial Sequence
  Description of Artificial Sequence: Synthetic oligonucleotide
ggggacaaggcaacatacctcag

SEQ ID NO: 4718 - DNA, 24 bp, Artificial Sequence
  Description of Artificial Sequence: Synthetic oligonucleotide
tccctccctccacatatacatgcg

SEQ ID NO: 4719 - DNA, 22 bp, Artificial Sequence
  Description of Artificial Sequence: Synthetic oligonucleotide
ccgtgagaaaaggaggagcccg

SEQ ID NO: 4720 - DNA, 25 bp, Artificial Sequence
  Description of Artificial Sequence: Synthetic oligonucleotide
tcacaaggaccagagctgtttagcc

SEQ ID NO: 4721 - DNA, 25 bp, Artificial Sequence
  Description of Artificial Sequence: Synthetic oligonucleotide
tcattgtcacaacctagctggaaca

SEQ ID NO: 4722 - DNA, 25 bp, Artificial Sequence
  Description of Artificial Sequence: Synthetic oligonucleotide
gacagcatgaacagaagtgaggacg

SEQ ID NO: 4723 - DNA, 23 bp, Artificial Sequence
  Description of Artificial Sequence: Synthetic oligonucleotide
cccaacgatcctgctgttcaacc

SEQ ID NO: 4724 - DNA, 27 bp, Artificial Sequence
  Description of Artificial Sequence: Synthetic oligonucleotide
tgtgatgatagggttacacatctgctc

SEQ ID NO: 4725 - DNA, 22 bp, Artificial Sequence
  Description of Artificial Sequence: Synthetic oligonucleotide
caatgtcatcgatcccctggac

SEQ ID NO: 4726 - DNA, 26 bp, Artificial Sequence
  Description of Artificial Sequence: Synthetic oligonucleotide
tgtattttttttaacaagcagcccac

SEQ ID NO: 4727 - DNA, 22 bp, Artificial Sequence
  Description of Artificial Sequence: Synthetic oligonucleotide
atgggaccttctggctgcctag

SEQ ID NO: 4728 - DNA, 20 bp, Artificial Sequence
  Description of Artificial Sequence: Synthetic oligonucleotide
gcgctgagtctgaggggaat

SEQ ID NO: 4729 - DNA, 22 bp, Artificial Sequence
  Description of Artificial Sequence: Synthetic oligonucleotide
tggtggggctctactcaccagc

SEQ ID NO: 4730 - DNA, 20 bp, Artificial Sequence
  Description of Artificial Sequence: Synthetic oligonucleotide
gccctgggagcagggaaacg

SEQ ID NO: 4731 - DNA, 18 bp, Artificial Sequence
  Description of Artificial Sequence: Synthetic oligonucleotide
ctggggcgaggaggcagg

SEQ ID NO: 4732 - DNA, 22 bp, Artificial Sequence
  Description of Artificial Sequence: Synthetic oligonucleotide
taggcctcgtcatcctcgtccc

SEQ ID NO: 4733 - DNA, 23 bp, Artificial Sequence
  Description of Artificial Sequence: Synthetic oligonucleotide
gactgcattcacaaaccttacta

SEQ ID NO: 4734 - DNA, 23 bp, Artificial Sequence
  Description of Artificial Sequence: Synthetic oligonucleotide
attaatttatagttccagcagca

SEQ ID NO: 4735 - DNA, 24 bp, Artificial Sequence
  Description of Artificial Sequence: Synthetic oligonucleotide
actccatttcaaatacttcaaatt

SEQ ID NO: 4736 - DNA, 23 bp, Artificial Sequence
  Description of Artificial Sequence: Synthetic oligonucleotide
ccctcctctcttcctatagaatc

SEQ ID NO: 4737 - DNA, 23 bp, Artificial Sequence
  Description of Artificial Sequence: Synthetic oligonucleotide
gtggagttgatgacaggagttat

SEQ ID NO: 4738 - DNA, 22 bp, Artificial Sequence
  Description of Artificial Sequence: Synthetic oligonucleotide
gatataggaaggcaatctcatg

SEQ ID NO: 4739 - DNA, 22 bp, Artificial Sequence
  Description of Artificial Sequence: Synthetic oligonucleotide
attaccattggcattaaggaag

SEQ ID NO: 4740 - DNA, 24 bp, Artificial Sequence
  Description of Artificial Sequence: Synthetic oligonucleotide
gttatgggaattatttcatttttt

SEQ ID NO: 4741 - DNA, 22 bp, Artificial Sequence
  Description of Artificial Sequence: Synthetic oligonucleotide
gaaacttcccaaatcttaactg

SEQ ID NO: 4742 - DNA, 22 bp, Artificial Sequence
  Description of Artificial Sequence: Synthetic oligonucleotide
ggttttcacaggaaatcttcat

SEQ ID NO: 4743 - DNA, 25 bp, Artificial Sequence
  Description of Artificial Sequence: Synthetic oligonucleotide
gaacaatttcctatgatctttaaaa

SEQ ID NO: 4744 - DNA, 24 bp, Artificial Sequence
  Description of Artificial Sequence: Synthetic oligonucleotide
caatgaaagaagacttatagggac

SEQ ID NO: 4745 - DNA, 23 bp, Artificial Sequence
  Description of Artificial Sequence: Synthetic oligonucleotide
gagcagaagaggacagtttttac

SEQ ID NO: 4746 - DNA, 25 bp, Artificial Sequence
  Description of Artificial Sequence: Synthetic oligonucleotide
cctgtctttattcttttatctgaag

SEQ ID NO: 4747 - DNA, 21 bp, Artificial Sequence
  Description of Artificial Sequence: Synthetic oligonucleotide
catgtcagtgacaaggagttc

SEQ ID NO: 4748 - DNA, 21 bp, Artificial Sequence
  Description of Artificial Sequence: Synthetic oligonucleotide
ctttccgtgttggttaattgt

SEQ ID NO: 4749 - DNA, 22 bp, Artificial Sequence
  Description of Artificial Sequence: Synthetic oligonucleotide
aaggtaggatgagcattctgag

SEQ ID NO: 4750 - DNA, 23 bp, Artificial Sequence
  Description of Artificial Sequence: Synthetic oligonucleotide
gcaataagatcttaacccacagt

SEQ ID NO: 4751 - DNA, 24 bp, Artificial Sequence
  Description of Artificial Sequence: Synthetic oligonucleotide
taacattctccttttcataacact

SEQ ID NO: 4752 - DNA, 23 bp, Artificial Sequence
  Description of Artificial Sequence: Synthetic oligonucleotide
caacctcttaccattgtagtgtc

SEQ ID NO: 4753 - DNA, 21 bp, Artificial Sequence
  Description of Artificial Sequence: Synthetic oligonucleotide
tgtttacctggcagtctacag

SEQ ID NO: 4754 - DNA, 24 bp, Artificial Sequence
  Description of Artificial Sequence: Synthetic oligonucleotide
acactggtttgtctagagattttt

SEQ ID NO: 4755 - DNA, 21 bp, Artificial Sequence
  Description of Artificial Sequence: Synthetic oligonucleotide
tgtaagagagctctccattcc

SEQ ID NO: 4756 - DNA, 25 bp, Artificial Sequence
  Description of Artificial Sequence: Synthetic oligonucleotide
gtctttgtctctagtactgaacctg

SEQ ID NO: 4757 - DNA, 25 bp, Artificial Sequence
  Description of Artificial Sequence: Synthetic oligonucleotide
attttttctttcactcttattgatt

SEQ ID NO: 4758 - DNA, 21 bp, Artificial Sequence
  Description of Artificial Sequence: Synthetic oligonucleotide
ttcccttactcttccttccat

SEQ ID NO: 4759 - DNA, 22 bp, Artificial Sequence
  Description of Artificial Sequence: Synthetic oligonucleotide
gaggggacttccttctattttc

SEQ ID NO: 4760 - DNA, 21 bp, Artificial Sequence
  Description of Artificial Sequence: Synthetic oligonucleotide
cccagtcttcttctgttttca

SEQ ID NO: 4761 - DNA, 21 bp, Artificial Sequence
  Description of Artificial Sequence: Synthetic oligonucleotide
ggtcagattcactagcagagc

SEQ ID NO: 4762 - DNA, 22 bp, Artificial Sequence
  Description of Artificial Sequence: Synthetic oligonucleotide
gtaatattttggggggactact

SEQ ID NO: 4763 - DNA, 24 bp, Artificial Sequence
  Description of Artificial Sequence: Synthetic oligonucleotide
agtaggaaagaaaaggtacagagg

SEQ ID NO: 4764 - DNA, 21 bp, Artificial Sequence
  Description of Artificial Sequence: Synthetic oligonucleotide
cctcctctgtaaataaggggt

SEQ ID NO: 4765 - DNA, 23 bp, Artificial Sequence
  Description of Artificial Sequence: Synthetic oligonucleotide
tagaaagatggagaatttgggta

SEQ ID NO: 4766 - DNA, 21 bp, Artificial Sequence
  Description of Artificial Sequence: Synthetic oligonucleotide
aaggaatattgtccaccccta

SEQ ID NO: 4767 - DNA, 21 bp, Artificial Sequence
  Description of Artificial Sequence: Synthetic oligonucleotide
gaagttgccctgtaaattcag

SEQ ID NO: 4768 - DNA, 23 bp, Artificial Sequence
  Description of Artificial Sequence: Synthetic oligonucleotide
gtaagatactctttcacaatgcc

SEQ ID NO: 4769 - DNA, 21 bp, Artificial Sequence
  Description of Artificial Sequence: Synthetic oligonucleotide
ctgaaggaggagagaggaaag

SEQ ID NO: 4770 - DNA, 21 bp, Artificial Sequence
  Description of Artificial Sequence: Synthetic oligonucleotide
aagtgagaccaaggaaaaagc

SEQ ID NO: 4771 - DNA, 21 bp, Artificial Sequence
  Description of Artificial Sequence: Synthetic oligonucleotide
ggaaattcttgggttcaagtc

SEQ ID NO: 4772 - DNA, 21 bp, Artificial Sequence
  Description of Artificial Sequence: Synthetic oligonucleotide
tttccatggaaagtcttcttc

SEQ ID NO: 4773 - DNA, 24 bp, Artificial Sequence
  Description of Artificial Sequence: Synthetic oligonucleotide
atgataagtgactgtgtcaatcac

SEQ ID NO: 4774 - DNA, 23 bp, Artificial Sequence
  Description of Artificial Sequence: Synthetic oligonucleotide
gatcaactcaccagaaagatgat

SEQ ID NO: 4775 - DNA, 21 bp, Artificial Sequence
  Description of Artificial Sequence: Synthetic oligonucleotide
aatggacgtgtagagtcagga

SEQ ID NO: 4776 - DNA, 21 bp, Artificial Sequence
  Description of Artificial Sequence: Synthetic oligonucleotide
ggttcattttcagtttaggcc

SEQ ID NO: 4777 - DNA, 26 bp, Artificial Sequence
  Description of Artificial Sequence: Synthetic oligonucleotide
atagaaatgagtcacaacttatttcc

SEQ ID NO: 4778 - DNA, 21 bp, Artificial Sequence
  Description of Artificial Sequence: Synthetic oligonucleotide
tgtgaagatgaggagaaagag

SEQ ID NO: 4779 - DNA, 24 bp, Artificial Sequence
  Description of Artificial Sequence: Synthetic oligonucleotide
ccacttatcttcctactatcctct

SEQ ID NO: 4780 - DNA, 22 bp, Artificial Sequence
  Description of Artificial Sequence: Synthetic oligonucleotide
tttctagagaagccaatcagtg

SEQ ID NO: 4781 - DNA, 20 bp, Artificial Sequence
  Description of Artificial Sequence: Synthetic oligonucleotide
cacacattcttgctctaccc

SEQ ID NO: 4782 - DNA, 22 bp, Artificial Sequence
  Description of Artificial Sequence: Synthetic oligonucleotide
gtcttgattttgcttcactgag

SEQ ID NO: 4783 - DNA, 20 bp, Artificial Sequence
  Description of Artificial Sequence: Synthetic oligonucleotide
tccacgagtcaggtactagg

SEQ ID NO: 4784 - DNA, 20 bp, Artificial Sequence
  Description of Artificial Sequence: Synthetic oligonucleotide
cctacttgcaagttccattg

SEQ ID NO: 4785 - DNA, 24 bp, Artificial Sequence
  Description of Artificial Sequence: Synthetic oligonucleotide
ccggagtattctaagtaaagtgtt

SEQ ID NO: 4786 - DNA, 26 bp, Artificial Sequence
  Description of Artificial Sequence: Synthetic oligonucleotide
gaagtcagaaatttataatgtgatca

SEQ ID NO: 4787 - DNA, 25 bp, Artificial Sequence
  Description of Artificial Sequence: Synthetic oligonucleotide
accacacaatttattgtaataaaat

SEQ ID NO: 4788 - DNA, 21 bp, Artificial Sequence
  Description of Artificial Sequence: Synthetic oligonucleotide
gatgggaatcacatgactctg

SEQ ID NO: 4789 - DNA, 21 bp, Artificial Sequence
  Description of Artificial Sequence: Synthetic oligonucleotide
gtcacctccccttagactgaa

SEQ ID NO: 4790 - DNA, 20 bp, Artificial Sequence
  Description of Artificial Sequence: Synthetic oligonucleotide
tgaaacagatgaggacgttg

SEQ ID NO: 4791 - DNA, 21 bp, Artificial Sequence
  Description of Artificial Sequence: Synthetic oligonucleotide
gtgctctaccacacaggtgta

SEQ ID NO: 4792 - DNA, 23 bp, Artificial Sequence
  Description of Artificial Sequence: Synthetic oligonucleotide
ataatctaaaaacaagagggtgg

SEQ ID NO: 4793 - DNA, 21 bp, Artificial Sequence
  Description of Artificial Sequence: Synthetic oligonucleotide
agtgcccactatgtgttagga

SEQ ID NO: 4794 - DNA, 24 bp, Artificial Sequence
  Description of Artificial Sequence: Synthetic oligonucleotide
gaagcacagtactatttacaacca

SEQ ID NO: 4795 - DNA, 20 bp, Artificial Sequence
  Description of Artificial Sequence: Synthetic oligonucleotide
ggagggacaggacctctatt

SEQ ID NO: 4796 - DNA, 20 bp, Artificial Sequence
  Description of Artificial Sequence: Synthetic oligonucleotide
ttcctagtgcaaccagaggt

SEQ ID NO: 4797 - DNA, 21 bp, Artificial Sequence
  Description of Artificial Sequence: Synthetic oligonucleotide
gccaggtgatattgatcacag

SEQ ID NO: 4798 - DNA, 21 bp, Artificial Sequence
  Description of Artificial Sequence: Synthetic oligonucleotide
cccacataccagttttctcct

SEQ ID NO: 4799 - DNA, 21 bp, Artificial Sequence
  Description of Artificial Sequence: Synthetic oligonucleotide
attactgcttctctttgaggg

SEQ ID NO: 4800 - DNA, 21 bp, Artificial Sequence
  Description of Artificial Sequence: Synthetic oligonucleotide
ttgatactgaggatgaaggga

SEQ ID NO: 4801 - DNA, 24 bp, Artificial Sequence
  Description of Artificial Sequence: Synthetic oligonucleotide
tttcacattcacaggtatttttat

SEQ ID NO: 4802 - DNA, 20 bp, Artificial Sequence
  Description of Artificial Sequence: Synthetic oligonucleotide
ctgcggatccagaagtacag

SEQ ID NO: 4803 - DNA, 19 bp, Artificial Sequence
  Description of Artificial Sequence: Synthetic oligonucleotide
tgggctaatcttccttctg

SEQ ID NO: 4804 - DNA, 22 bp, Artificial Sequence
  Description of Artificial Sequence: Synthetic oligonucleotide
gtgaatgtagctctttgcttgt

SEQ ID NO: 4805 - DNA, 27 bp, Artificial Sequence
  Description of Artificial Sequence: Synthetic oligonucleotide
actcatacctataaatgtcttaagtca

SEQ ID NO: 4806 - DNA, 25 bp, Artificial Sequence
  Description of Artificial Sequence: Synthetic oligonucleotide
tttattttaacctatttacctctga

SEQ ID NO: 4807 - DNA, 20 bp, Artificial Sequence
  Description of Artificial Sequence: Synthetic oligonucleotide
cccttgatgatgaagatggt

SEQ ID NO: 4808 - DNA, 19 bp, Artificial Sequence
  Description of Artificial Sequence: Synthetic oligonucleotide
tgggagtcagtagagctcg

SEQ ID NO: 4809 - DNA, 19 bp, Artificial Sequence
  Description of Artificial Sequence: Synthetic oligonucleotide
tctgactttttctgcctcc

SEQ ID NO: 4810 - DNA, 19 bp, Artificial Sequence
  Description of Artificial Sequence: Synthetic oligonucleotide
tcccatgcattctgagatc

SEQ ID NO: 4811 - DNA, 19 bp, Artificial Sequence
  Description of Artificial Sequence: Synthetic oligonucleotide
tctccattccagtccaagt

SEQ ID NO: 4812 - DNA, 20 bp, Artificial Sequence
  Description of Artificial Sequence: Synthetic oligonucleotide
tcatggtccctgagagtgac

SEQ ID NO: 4813 - DNA, 23 bp, Artificial Sequence
  Description of Artificial Sequence: Synthetic oligonucleotide
agaactgaatacttgggtctctc

SEQ ID NO: 4814 - DNA, 19 bp, Artificial Sequence
  Description of Artificial Sequence: Synthetic oligonucleotide
ggtagaaggcacagaggtc

SEQ ID NO: 4815 - DNA, 21 bp, Artificial Sequence
  Description of Artificial Sequence: Synthetic oligonucleotide
gtgagacacctcactccctct

SEQ ID NO: 4816 - DNA, 23 bp, Artificial Sequence
  Description of Artificial Sequence: Synthetic oligonucleotide
aaagatagtcgggaaaatatctg

SEQ ID NO: 4817 - DNA, 23 bp, Artificial Sequence
  Description of Artificial Sequence: Synthetic oligonucleotide
ctttatctactgccctttcctac

SEQ ID NO: 4818 - DNA, 23 bp, Artificial Sequence
  Description of Artificial Sequence: Synthetic oligonucleotide
caaaactgagttgtgtattgatg

SEQ ID NO: 4819 - DNA, 19 bp, Artificial Sequence
  Description of Artificial Sequence: Synthetic oligonucleotide
caagctgcttctgcaactt

SEQ ID NO: 4820 - DNA, 23 bp, Artificial Sequence
  Description of Artificial Sequence: Synthetic oligonucleotide
actgcctgtttttaggaagtatc

SEQ ID NO: 4821 - DNA, 25 bp, Artificial Sequence
  Description of Artificial Sequence: Synthetic oligonucleotide
acagtttttaagacaccaactattt

SEQ ID NO: 4822 - DNA, 23 bp, Artificial Sequence
  Description of Artificial Sequence: Synthetic oligonucleotide
aggctgctacacttttacctatg

SEQ ID NO: 4823 - DNA, 20 bp, Artificial Sequence
  Description of Artificial Sequence: Synthetic oligonucleotide
aactcacagacaaccgtggt

SEQ ID NO: 4824 - DNA, 22 bp, Artificial Sequence
  Description of Artificial Sequence: Synthetic oligonucleotide
acatgatcttcacctctttcag

SEQ ID NO: 4825 - DNA, 25 bp, Artificial Sequence
  Description of Artificial Sequence: Synthetic oligonucleotide
cttacactaattataatgggaaaca

SEQ ID NO: 4826 - DNA, 19 bp, Artificial Sequence
  Description of Artificial Sequence: Synthetic oligonucleotide
tccattttcttcccctcct

SEQ ID NO: 4827 - DNA, 21 bp, Artificial Sequence
  Description of Artificial Sequence: Synthetic oligonucleotide
agtgcttcaggtatcagcttc

SEQ ID NO: 4828 - DNA, 20 bp, Artificial Sequence
  Description of Artificial Sequence: Synthetic oligonucleotide
aggagaggacatggctcact

SEQ ID NO: 4829 - DNA, 22 bp, Artificial Sequence
  Description of Artificial Sequence: Synthetic oligonucleotide
gtctgactacaaatcccgaaag

SEQ ID NO: 4830 - DNA, 22 bp, Artificial Sequence
  Description of Artificial Sequence: Synthetic oligonucleotide
aaaaactgaggcacgattttac

SEQ ID NO: 4831 - DNA, 20 bp, Artificial Sequence
  Description of Artificial Sequence: Synthetic oligonucleotide
aggctcactctcatcatcca

SEQ ID NO: 4832 - DNA, 20 bp, Artificial Sequence
  Description of Artificial Sequence: Synthetic oligonucleotide
tgtcacaaacccatgaggat

SEQ ID NO: 4833 - DNA, 19 bp, Artificial Sequence
  Description of Artificial Sequence: Synthetic oligonucleotide
ggattactagggcggagag

SEQ ID NO: 4834 - DNA, 24 bp, Artificial Sequence
  Description of Artificial Sequence: Synthetic oligonucleotide
catacagtcatacagataatcgga

SEQ ID NO: 4835 - DNA, 19 bp, Artificial Sequence
  Description of Artificial Sequence: Synthetic oligonucleotide
tgtctgtgtggttttgatt

SEQ ID NO: 4836 - DNA, 26 bp, Artificial Sequence
  Description of Artificial Sequence: Synthetic oligonucleotide
tgttatttcataatattgttcagttt

SEQ ID NO: 4837 - DNA, 25 bp, Artificial Sequence
  Description of Artificial Sequence: Synthetic oligonucleotide
gagaaaaatatactaagaaaggcaa

SEQ ID NO: 4838 - DNA, 19 bp, Artificial Sequence
  Description of Artificial Sequence: Synthetic oligonucleotide
gggtgttatggcaggaggt

SEQ ID NO: 4839 - DNA, 18 bp, Artificial Sequence
  Description of Artificial Sequence: Synthetic oligonucleotide
gaggccaagggtcacttc

SEQ ID NO: 4840 - DNA, 18 bp, Artificial Sequence
  Description of Artificial Sequence: Synthetic oligonucleotide
tgatcttggagtaggcgc

SEQ ID NO: 4841 - DNA, 23 bp, Artificial Sequence
  Description of Artificial Sequence: Synthetic oligonucleotide
tagcaatatgtattgaaagccat

SEQ ID NO: 4842 - DNA, 27 bp, Artificial Sequence
  Description of Artificial Sequence: Synthetic oligonucleotide
tatgttattatgtttgatcattttatg

SEQ ID NO: 4843 - DNA, 22 bp, Artificial Sequence
  Description of Artificial Sequence: Synthetic oligonucleotide
gatccctggtttattcatgtaa

SEQ ID NO: 4844 - DNA, 23 bp, Artificial Sequence
  Description of Artificial Sequence: Synthetic oligonucleotide
gtacagatgctctccaacttaac

SEQ ID NO: 4845 - DNA, 22 bp, Artificial Sequence
  Description of Artificial Sequence: Synthetic oligonucleotide
tgactggactcatctttaacct

SEQ ID NO: 4846 - DNA, 21 bp, Artificial Sequence
  Description of Artificial Sequence: Synthetic oligonucleotide
agaagagctcaggtaaggaag

SEQ ID NO: 4847 - DNA, 22 bp, Artificial Sequence
  Description of Artificial Sequence: Synthetic oligonucleotide
cccctaagtcttaaccctcata

SEQ ID NO: 4848 - DNA, 21 bp, Artificial Sequence
  Description of Artificial Sequence: Synthetic oligonucleotide
agttatggttcaccctacctc

SEQ ID NO: 4849 - DNA, 20 bp, Artificial Sequence
  Description of Artificial Sequence: Synthetic oligonucleotide
gtaagagggacctatgggac

SEQ ID NO: 4850 - DNA, 21 bp, Artificial Sequence
  Description of Artificial Sequence: Synthetic oligonucleotide
tacaaatgagtaggtgctggc

SEQ ID NO: 4851 - DNA, 23 bp, Artificial Sequence
  Description of Artificial Sequence: Synthetic oligonucleotide
agtgtttcacggacataagaaat

SEQ ID NO: 4852 - DNA, 22 bp, Artificial Sequence
  Description of Artificial Sequence: Synthetic oligonucleotide
acctgagggctctaaacagcta

SEQ ID NO: 4853 - DNA, 20 bp, Artificial Sequence
  Description of Artificial Sequence: Synthetic oligonucleotide
aaaagccaggagctacacac

SEQ ID NO: 4854 - DNA, 23 bp, Artificial Sequence
  Description of Artificial Sequence: Synthetic oligonucleotide
tgaactgttgctcatttgtctat

SEQ ID NO: 4855 - DNA, 19 bp, Artificial Sequence
  Description of Artificial Sequence: Synthetic oligonucleotide
tgtcctgagtttggtcctc

SEQ ID NO: 4856 - DNA, 19 bp, Artificial Sequence
  Description of Artificial Sequence: Synthetic oligonucleotide
tctccttctcagaaatggg

SEQ ID NO: 4857 - DNA, 27 bp, Artificial Sequence
  Description of Artificial Sequence: Synthetic oligonucleotide
agtactaatggttataaagcaattaga

SEQ ID NO: 4858 - DNA, 22 bp, Artificial Sequence
  Description of Artificial Sequence: Synthetic oligonucleotide
agcaaataaaaatcacaaagga

SEQ ID NO: 4859 - DNA, 21 bp, Artificial Sequence
  Description of Artificial Sequence: Synthetic oligonucleotide
tctagagaagccaatcagcgt

SEQ ID NO: 4860 - DNA, 19 bp, Artificial Sequence
  Description of Artificial Sequence: Synthetic oligonucleotide
cagcaacgatacccatgat

SEQ ID NO: 4861 - DNA, 19 bp, Artificial Sequence
  Description of Artificial Sequence: Synthetic oligonucleotide
ttggttaccttggctcagt

SEQ ID NO: 4862 - DNA, 23 bp, Artificial Sequence
  Description of Artificial Sequence: Synthetic oligonucleotide
ttggaaggaagtttagagttcat

SEQ ID NO: 4863 - DNA, 22 bp, Artificial Sequence
  Description of Artificial Sequence: Synthetic oligonucleotide
aggcataaaggacttgaaactc

SEQ ID NO: 4864 - DNA, 19 bp, Artificial Sequence
  Description of Artificial Sequence: Synthetic oligonucleotide
gcaggtaggttttgagcag

SEQ ID NO: 4865 - DNA, 21 bp, Artificial Sequence
  Description of Artificial Sequence: Synthetic oligonucleotide
aatggagactggacataccag

SEQ ID NO: 4866 - DNA, 20 bp, Artificial Sequence
  Description of Artificial Sequence: Synthetic oligonucleotide
ccttctcccctacatctgag

SEQ ID NO: 4867 - DNA, 18 bp, Artificial Sequence
  Description of Artificial Sequence: Synthetic oligonucleotide
ccctccagtggatgattg

SEQ ID NO: 4868 - DNA, 24 bp, Artificial Sequence
  Description of Artificial Sequence: Synthetic oligonucleotide
acagggatttcttctgatatttaa

SEQ ID NO: 4869 - DNA, 21 bp, Artificial Sequence
  Description of Artificial Sequence: Synthetic oligonucleotide
tttcttcccacagattgaaaa

SEQ ID NO: 4870 - DNA, 24 bp, Artificial Sequence
  Description of Artificial Sequence: Synthetic oligonucleotide
ttattccttgattctaaagcaatt

SEQ ID NO: 4871 - DNA, 23 bp, Artificial Sequence
  Description of Artificial Sequence: Synthetic oligonucleotide
acattctattggtttgtgtgttt

SEQ ID NO: 4872 - DNA, 23 bp, Artificial Sequence
  Description of Artificial Sequence: Synthetic oligonucleotide
tgagcaaaaatataaagggaaat

SEQ ID NO: 4873 - DNA, 23 bp, Artificial Sequence
  Description of Artificial Sequence: Synthetic oligonucleotide
cagatcactttctaactctggaa

SEQ ID NO: 4874 - DNA, 24 bp, Artificial Sequence
  Description of Artificial Sequence: Synthetic oligonucleotide
cttttcacactacttatgctttga

SEQ ID NO: 4875 - DNA, 23 bp, Artificial Sequence
  Description of Artificial Sequence: Synthetic oligonucleotide
gagaagtttatagtggggtcagt

SEQ ID NO: 4876 - DNA, 23 bp, Artificial Sequence
  Description of Artificial Sequence: Synthetic oligonucleotide
cataacgaccttttacaatgttt

SEQ ID NO: 4877 - DNA, 23 bp, Artificial Sequence
  Description of Artificial Sequence: Synthetic oligonucleotide
tctccagaatatctctctgacct

SEQ ID NO: 4878 - DNA, 24 bp, Artificial Sequence
  Description of Artificial Sequence: Synthetic oligonucleotide
aaaccgagtagcttaaactacaga

SEQ ID NO: 4879 - DNA, 23 bp, Artificial Sequence
  Description of Artificial Sequence: Synthetic oligonucleotide
gagtataagaaaccttgggagaa

SEQ ID NO: 4880 - DNA, 23 bp, Artificial Sequence
  Description of Artificial Sequence: Synthetic oligonucleotide
gagtataagaaaccttgggagaa

SEQ ID NO: 4881 - DNA, 23 bp, Artificial Sequence
  Description of Artificial Sequence: Synthetic oligonucleotide
gtgtttattctactccaggtgtc

SEQ ID NO: 4882 - DNA, 22 bp, Artificial Sequence
  Description of Artificial Sequence: Synthetic oligonucleotide
accaaagatttggagctttaat

SEQ ID NO: 4883 - DNA, 22 bp, Artificial Sequence
  Description of Artificial Sequence: Synthetic oligonucleotide
aaatagccaaaagacagtgttc

SEQ ID NO: 4884 - DNA, 23 bp, Artificial Sequence
  Description of Artificial Sequence: Synthetic oligonucleotide
ctctggggagtatatgtttgaat

SEQ ID NO: 4885 - DNA, 22 bp, Artificial Sequence
  Description of Artificial Sequence: Synthetic oligonucleotide
gtatcaacacatgataatcgca

SEQ ID NO: 4886 - DNA, 23 bp, Artificial Sequence
  Description of Artificial Sequence: Synthetic oligonucleotide
ttgtgattagattttcattgcat

SEQ ID NO: 4887 - DNA, 24 bp, Artificial Sequence
  Description of Artificial Sequence: Synthetic oligonucleotide
taagcaaagtggtgagtaataatg

SEQ ID NO: 4888 - DNA, 22 bp, Artificial Sequence
  Description of Artificial Sequence: Synthetic oligonucleotide
tccaggattatcaaaaactgag

SEQ ID NO: 4889 - DNA, 23 bp, Artificial Sequence
  Description of Artificial Sequence: Synthetic oligonucleotide
aataatgcttatatgacaagggc

SEQ ID NO: 4890 - DNA, 22 bp, Artificial Sequence
  Description of Artificial Sequence: Synthetic oligonucleotide
acagtggtaggtatctcaggtg

SEQ ID NO: 4891 - DNA, 22 bp, Artificial Sequence
  Description of Artificial Sequence: Synthetic oligonucleotide
tgggacagtttcaacaaactat

SEQ ID NO: 4892 - DNA, 24 bp, Artificial Sequence
  Description of Artificial Sequence: Synthetic oligonucleotide
gaacaatcaggaataactttttca

SEQ ID NO: 4893 - DNA, 22 bp, Artificial Sequence
  Description of Artificial Sequence: Synthetic oligonucleotide
tttccatttgagtttcttctgt

SEQ ID NO: 4894 - DNA, 24 bp, Artificial Sequence
  Description of Artificial Sequence: Synthetic oligonucleotide
tataacagactcagagctagcctt

SEQ ID NO: 4895 - DNA, 22 bp, Artificial Sequence
  Description of Artificial Sequence: Synthetic oligonucleotide
aaagagtcatctctgtgtcacc

SEQ ID NO: 4896 - DNA, 23 bp, Artificial Sequence
  Description of Artificial Sequence: Synthetic oligonucleotide
gaagatcaacactaggatgatga

SEQ ID NO: 4897 - DNA, 22 bp, Artificial Sequence
  Description of Artificial Sequence: Synthetic oligonucleotide
gtaggggagatagaggacagtt

SEQ ID NO: 4898 - DNA, 23 bp, Artificial Sequence
  Description of Artificial Sequence: Synthetic oligonucleotide
gccttctgtaacagtgtaacttt

SEQ ID NO: 4899 - DNA, 23 bp, Artificial Sequence
  Description of Artificial Sequence: Synthetic oligonucleotide
tgctaagaacttttctgcaatag

SEQ ID NO: 4900 - DNA, 23 bp, Artificial Sequence
  Description of Artificial Sequence: Synthetic oligonucleotide
tttctgtagttaagccttctcag

SEQ ID NO: 4901 - DNA, 23 bp, Artificial Sequence
  Description of Artificial Sequence: Synthetic oligonucleotide
atcaagatctcaacacaaatgtg

SEQ ID NO: 4902 - DNA, 23 bp, Artificial Sequence
  Description of Artificial Sequence: Synthetic oligonucleotide
cacaggttttgatgattagaaca

SEQ ID NO: 4903 - DNA, 22 bp, Artificial Sequence
  Description of Artificial Sequence: Synthetic oligonucleotide
tgacttactttggacgtgtaac

SEQ ID NO: 4904 - DNA, 22 bp, Artificial Sequence
  Description of Artificial Sequence: Synthetic oligonucleotide
ggatactaatcccaaaggaatg

SEQ ID NO: 4905 - DNA, 22 bp, Artificial Sequence
  Description of Artificial Sequence: Synthetic oligonucleotide
attctggatttatgacaaggct

SEQ ID NO: 4906 - DNA, 23 bp, Artificial Sequence
  Description of Artificial Sequence: Synthetic oligonucleotide
ctcatttcctaatctttaagtgg

SEQ ID NO: 4907 - DNA, 22 bp, Artificial Sequence
  Description of Artificial Sequence: Synthetic oligonucleotide
gtatgtgggaaggattttgatt

SEQ ID NO: 4908 - DNA, 23 bp, Artificial Sequence
  Description of Artificial Sequence: Synthetic oligonucleotide
tcatcttgtttagtctgcatctg

SEQ ID NO: 4909 - DNA, 24 bp, Artificial Sequence
  Description of Artificial Sequence: Synthetic oligonucleotide
ctaggatgtcattttattcatcat

SEQ ID NO: 4910 - DNA, 23 bp, Artificial Sequence
  Description of Artificial Sequence: Synthetic oligonucleotide
ggctgactttaaaactacaaaca

SEQ ID NO: 4911 - DNA, 22 bp, Artificial Sequence
  Description of Artificial Sequence: Synthetic oligonucleotide
gcaccataagaaatgtaaaagg

SEQ ID NO: 4912 - DNA, 23 bp, Artificial Sequence
  Description of Artificial Sequence: Synthetic oligonucleotide
agagaagtaaagacaggtggaga

SEQ ID NO: 4913 - DNA, 22 bp, Artificial Sequence
  Description of Artificial Sequence: Synthetic oligonucleotide
gaaaatacccaagtctgaagtg

SEQ ID NO: 4914 - DNA, 23 bp, Artificial Sequence
  Description of Artificial Sequence: Synthetic oligonucleotide
gagatcccttactctccagacta

SEQ ID NO: 4915 - DNA, 22 bp, Artificial Sequence
  Description of Artificial Sequence: Synthetic oligonucleotide
gctcatatcttgcctagttgtg

SEQ ID NO: 4916 - DNA, 23 bp, Artificial Sequence
  Description of Artificial Sequence: Synthetic oligonucleotide
cagaattactagaactcctggtc

SEQ ID NO: 4917 - DNA, 23 bp, Artificial Sequence
  Description of Artificial Sequence: Synthetic oligonucleotide
cttcaaaggagaacagaggataa

SEQ ID NO: 4918 - DNA, 24 bp, Artificial Sequence
  Description of Artificial Sequence: Synthetic oligonucleotide
cctttgtttgtctacttaaacttg

SEQ ID NO: 4919 - DNA, 23 bp, Artificial Sequence
  Description of Artificial Sequence: Synthetic oligonucleotide
ccttttttggaactttacttctt

SEQ ID NO: 4920 - DNA, 23 bp, Artificial Sequence
  Description of Artificial Sequence: Synthetic oligonucleotide
ataaccagagtaaggaaggaaag

SEQ ID NO: 4921 - DNA, 23 bp, Artificial Sequence
  Description of Artificial Sequence: Synthetic oligonucleotide
tgcttaatccctctaaatctcag

SEQ ID NO: 4922 - DNA, 24 bp, Artificial Sequence
  Description of Artificial Sequence: Synthetic oligonucleotide
gtttggtgtaacaaaaaatctttt

SEQ ID NO: 4923 - DNA, 22 bp, Artificial Sequence
  Description of Artificial Sequence: Synthetic oligonucleotide
gtgacgttatttcattacacgg

SEQ ID NO: 4924 - DNA, 22 bp, Artificial Sequence
  Description of Artificial Sequence: Synthetic oligonucleotide
caaaagtaagacctgatgtcct

SEQ ID NO: 4925 - DNA, 23 bp, Artificial Sequence
  Description of Artificial Sequence: Synthetic oligonucleotide
cacagattctaagagatgctgac

SEQ ID NO: 4926 - DNA, 23 bp, Artificial Sequence
  Description of Artificial Sequence: Synthetic oligonucleotide
tcttggcagtttgattataatgt

SEQ ID NO: 4927 - DNA, 22 bp, Artificial Sequence
  Description of Artificial Sequence: Synthetic oligonucleotide
aagtaatcaggatgagtcaggg

SEQ ID NO: 4928 - DNA, 24 bp, Artificial Sequence
  Description of Artificial Sequence: Synthetic oligonucleotide
ttactcttccaatccaaagtattc

SEQ ID NO: 4929 - DNA, 24 bp, Artificial Sequence
  Description of Artificial Sequence: Synthetic oligonucleotide
tttgcttcctccttattatttaag

SEQ ID NO: 4930 - DNA, 25 bp, Artificial Sequence
  Description of Artificial Sequence: Synthetic oligonucleotide
agtgtttgttcaagaataatagctg

SEQ ID NO: 4931 - DNA, 23 bp, Artificial Sequence
  Description of Artificial Sequence: Synthetic oligonucleotide
aagaaaacaagacaaactttgct

SEQ ID NO: 4932 - DNA, 22 bp, Artificial Sequence
  Description of Artificial Sequence: Synthetic oligonucleotide
aaatcacatgcattgtatccat

SEQ ID NO: 4933 - DNA, 23 bp, Artificial Sequence
  Description of Artificial Sequence: Synthetic oligonucleotide
tgtgaataaactctggtagaggc

SEQ ID NO: 4934 - DNA, 22 bp, Artificial Sequence
  Description of Artificial Sequence: Synthetic oligonucleotide
ctctcatgatttgtcattggat

SEQ ID NO: 4935 - DNA, 23 bp, Artificial Sequence
  Description of Artificial Sequence: Synthetic oligonucleotide
atggattgaaaatatttggaaaa

SEQ ID NO: 4936 - DNA, 24 bp, Artificial Sequence
  Description of Artificial Sequence: Synthetic oligonucleotide
tacttatatagcactcaccaaacc

SEQ ID NO: 4937 - DNA, 22 bp, Artificial Sequence
  Description of Artificial Sequence: Synthetic oligonucleotide
ttttgatcatctaggaacagga

SEQ ID NO: 4938 - DNA, 22 bp, Artificial Sequence
  Description of Artificial Sequence: Synthetic oligonucleotide
aggacacacactcataaagctt

SEQ ID NO: 4939 - DNA, 23 bp, Artificial Sequence
  Description of Artificial Sequence: Synthetic oligonucleotide
catcatcctagtgttgatcttcc

SEQ ID NO: 4940 - DNA, 23 bp, Artificial Sequence
  Description of Artificial Sequence: Synthetic oligonucleotide
ttttctgtgaagattctcactcc

SEQ ID NO: 4941 - DNA, 25 bp, Artificial Sequence
  Description of Artificial Sequence: Synthetic oligonucleotide
ctgttcctaaataatactggacatt

SEQ ID NO: 4942 - DNA, 24 bp, Artificial Sequence
  Description of Artificial Sequence: Synthetic oligonucleotide
gaaaaaagtcactgaagtgaactt

SEQ ID NO: 4943 - DNA, 22 bp, Artificial Sequence
  Description of Artificial Sequence: Synthetic oligonucleotide
agagagtcagagacaccaaaac

SEQ ID NO: 4944 - DNA, 24 bp, Artificial Sequence
  Description of Artificial Sequence: Synthetic oligonucleotide
gagaaacagtcactctctcaattc

SEQ ID NO: 4945 - DNA, 22 bp, Artificial Sequence
  Description of Artificial Sequence: Synthetic oligonucleotide
ctctcacctttacaagctgtga

SEQ ID NO: 4946 - DNA, 22 bp, Artificial Sequence
  Description of Artificial Sequence: Synthetic oligonucleotide
gttgatgcctgatatagattgg

SEQ ID NO: 4947 - DNA, 23 bp, Artificial Sequence
  Description of Artificial Sequence: Synthetic oligonucleotide
gatgatccttaacttatgatggg

SEQ ID NO: 4948 - DNA, 22 bp, Artificial Sequence
  Description of Artificial Sequence: Synthetic oligonucleotide
atcggctggttatgttttaaac

SEQ ID NO: 4949 - DNA, 24 bp, Artificial Sequence
  Description of Artificial Sequence: Synthetic oligonucleotide
tactgctagtaagattttatggga

SEQ ID NO: 4950 - DNA, 24 bp, Artificial Sequence
  Description of Artificial Sequence: Synthetic oligonucleotide
gtcacgagagaagttttgatagtt

SEQ ID NO: 4951 - DNA, 23 bp, Artificial Sequence
  Description of Artificial Sequence: Synthetic oligonucleotide
cctggatacttgtgacataatcc

SEQ ID NO: 4952 - DNA, 23 bp, Artificial Sequence
  Description of Artificial Sequence: Synthetic oligonucleotide
tcattgataaatcagaaagcaaa

SEQ ID NO: 4953 - DNA, 22 bp, Artificial Sequence
  Description of Artificial Sequence: Synthetic oligonucleotide
gtcctcagtctctgtgtgtagc

SEQ ID NO: 4954 - DNA, 22 bp, Artificial Sequence
  Description of Artificial Sequence: Synthetic oligonucleotide
cattgtctaagttccctccagt

SEQ ID NO: 4955 - DNA, 22 bp, Artificial Sequence
  Description of Artificial Sequence: Synthetic oligonucleotide
tgtctttatccagtggctctaa

SEQ ID NO: 4956 - DNA, 22 bp, Artificial Sequence
  Description of Artificial Sequence: Synthetic oligonucleotide
tctcagaatgtccactgactgt

SEQ ID NO: 4957 - DNA, 23 bp, Artificial Sequence
  Description of Artificial Sequence: Synthetic oligonucleotide
cattttttacagaaatggaaaaa

SEQ ID NO: 4958 - DNA, 24 bp, Artificial Sequence
  Description of Artificial Sequence: Synthetic oligonucleotide
gtcatgaaagatgatgactttaaa

SEQ ID NO: 4959 - DNA, 22 bp, Artificial Sequence
  Description of Artificial Sequence: Synthetic oligonucleotide
tttctatgcagctacttctgtg

SEQ ID NO: 4960 - DNA, 22 bp, Artificial Sequence
  Description of Artificial Sequence: Synthetic oligonucleotide
tgactttttctgaccacaaaat

SEQ ID NO: 4961 - DNA, 24 bp, Artificial Sequence
  Description of Artificial Sequence: Synthetic oligonucleotide
ctttggtcgtatactaagaacctc

SEQ ID NO: 4962 - DNA, 23 bp, Artificial Sequence
  Description of Artificial Sequence: Synthetic oligonucleotide
aaggtagtacaggagaggaaaat

SEQ ID NO: 4963 - DNA, 21 bp, Artificial Sequence
  Description of Artificial Sequence: Synthetic oligonucleotide
gtaggcataatgtgaggaggt

SEQ ID NO: 4964 - DNA, 22 bp, Artificial Sequence
  Description of Artificial Sequence: Synthetic oligonucleotide
tatctggcttctgtgttctttt

SEQ ID NO: 4965 - DNA, 22 bp, Artificial Sequence
  Description of Artificial Sequence: Synthetic oligonucleotide
tttcctccaagttatatgctga

SEQ ID NO: 4966 - DNA, 22 bp, Artificial Sequence
  Description of Artificial Sequence: Synthetic oligonucleotide
tgctaagttttacataggggag

SEQ ID NO: 4967 - DNA, 23 bp, Artificial Sequence
  Description of Artificial Sequence: Synthetic oligonucleotide
agacaggtaggtttctgcactta

SEQ ID NO: 4968 - DNA, 22 bp, Artificial Sequence
  Description of Artificial Sequence: Synthetic oligonucleotide
ttggagtatgcttttaggcttt

SEQ ID NO: 4969 - DNA, 23 bp, Artificial Sequence
  Description of Artificial Sequence: Synthetic oligonucleotide
ctaccagacccttcttgagaaat

SEQ ID NO: 4970 - DNA, 21 bp, Artificial Sequence
  Description of Artificial Sequence: Synthetic oligonucleotide
tgtgctaggcattacgtagac

SEQ ID NO: 4971 - DNA, 24 bp, Artificial Sequence
  Description of Artificial Sequence: Synthetic oligonucleotide
tttggaagaagaattctaatcaga

SEQ ID NO: 4972 - DNA, 21 bp, Artificial Sequence
  Description of Artificial Sequence: Synthetic oligonucleotide
catatcgtctgacaggtgtgt

SEQ ID NO: 4973 - DNA, 25 bp, Artificial Sequence
  Description of Artificial Sequence: Synthetic oligonucleotide
acattcaaacatagtatatcgttca

SEQ ID NO: 4974 - DNA, 22 bp, Artificial Sequence
  Description of Artificial Sequence: Synthetic oligonucleotide
ctgtaaccaaaggatgagtcat

SEQ ID NO: 4975 - DNA, 21 bp, Artificial Sequence
  Description of Artificial Sequence: Synthetic oligonucleotide
agtcacgaggaataggatcag

SEQ ID NO: 4976 - DNA, 25 bp, Artificial Sequence
  Description of Artificial Sequence: Synthetic oligonucleotide
ctgagacaattgtattaatcagatg

SEQ ID NO: 4977 - DNA, 23 bp, Artificial Sequence
  Description of Artificial Sequence: Synthetic oligonucleotide
gttatccgtgtgtagttattccg

SEQ ID NO: 4978 - DNA, 21 bp, Artificial Sequence
  Description of Artificial Sequence: Synthetic oligonucleotide
aacttatgagcccatttttgt

SEQ ID NO: 4979 - DNA, 21 bp, Artificial Sequence
  Description of Artificial Sequence: Synthetic oligonucleotide
gacaataaacctccacattcc

SEQ ID NO: 4980 - DNA, 22 bp, Artificial Sequence
  Description of Artificial Sequence: Synthetic oligonucleotide
ttacactgagatcaaacctgac

SEQ ID NO: 4981 - DNA, 22 bp, Artificial Sequence
  Description of Artificial Sequence: Synthetic oligonucleotide
tgagagagtataatgggcaaag

SEQ ID NO: 4982 - DNA, 21 bp, Artificial Sequence
  Description of Artificial Sequence: Synthetic oligonucleotide
ttcatctgcttggtacagatc

SEQ ID NO: 4983 - DNA, 22 bp, Artificial Sequence
  Description of Artificial Sequence: Synthetic oligonucleotide
gatcctggataccttgagaatg

SEQ ID NO: 4984 - DNA, 24 bp, Artificial Sequence
  Description of Artificial Sequence: Synthetic oligonucleotide
agtgacctctgtgtctaacataga

SEQ ID NO: 4985 - DNA, 21 bp, Artificial Sequence
  Description of Artificial Sequence: Synthetic oligonucleotide
tgctccacttggtcttaattt

SEQ ID NO: 4986 - DNA, 25 bp, Artificial Sequence
  Description of Artificial Sequence: Synthetic oligonucleotide
agttttggtaaatctctaaaaattg

SEQ ID NO: 4987 - DNA, 24 bp, Artificial Sequence
  Description of Artificial Sequence: Synthetic oligonucleotide
agtcaataaaatcacaaaagagaa

SEQ ID NO: 4988 - DNA, 24 bp, Artificial Sequence
  Description of Artificial Sequence: Synthetic oligonucleotide
ttttgatagcattgcaagtataat

SEQ ID NO: 4989 - DNA, 23 bp, Artificial Sequence
  Description of Artificial Sequence: Synthetic oligonucleotide
gagttaatagtagcagggaagga

SEQ ID NO: 4990 - DNA, 24 bp, Artificial Sequence
  Description of Artificial Sequence: Synthetic oligonucleotide
gatttttctagttgaagcataagc

SEQ ID NO: 4991 - DNA, 22 bp, Artificial Sequence
  Description of Artificial Sequence: Synthetic oligonucleotide
ttaggacagtcaaagcaggata

SEQ ID NO: 4992 - DNA, 25 bp, Artificial Sequence
  Description of Artificial Sequence: Synthetic oligonucleotide
gtttctataagaactggcataaatc

SEQ ID NO: 4993 - DNA, 22 bp, Artificial Sequence
  Description of Artificial Sequence: Synthetic oligonucleotide
agtcacgtggtaagagaggaac

SEQ ID NO: 4994 - DNA, 22 bp, Artificial Sequence
  Description of Artificial Sequence: Synthetic oligonucleotide
caaggaagaccttatcaaagag

SEQ ID NO: 4995 - DNA, 22 bp, Artificial Sequence
  Description of Artificial Sequence: Synthetic oligonucleotide
gtggcaggttttaatagaacag

SEQ ID NO: 4996 - DNA, 23 bp, Artificial Sequence
  Description of Artificial Sequence: Synthetic oligonucleotide
tcaacttcccctattttacatct

SEQ ID NO: 4997 - DNA, 22 bp, Artificial Sequence
  Description of Artificial Sequence: Synthetic oligonucleotide
ggaaacagtcaactccatttct

SEQ ID NO: 4998 - DNA, 21 bp, Artificial Sequence
  Description of Artificial Sequence: Synthetic oligonucleotide
ctgaagatgactgctttcact

SEQ ID NO: 4999 - DNA, 23 bp, Artificial Sequence
  Description of Artificial Sequence: Synthetic oligonucleotide
aaaagaaaggagatgcagaagta

SEQ ID NO: 5000 - DNA, 21 bp, Artificial Sequence
  Description of Artificial Sequence: Synthetic oligonucleotide
atttttttaaatgcctccttg

SEQ ID NO: 5001 - DNA, 23 bp, Artificial Sequence
  Description of Artificial Sequence: Synthetic oligonucleotide
tccgtatgtcctactctgtaatc

SEQ ID NO: 5002 - DNA, 24 bp, Artificial Sequence
  Description of Artificial Sequence: Synthetic oligonucleotide
ggaattcttacaagttttccttag

SEQ ID NO: 5003 - DNA, 22 bp, Artificial Sequence
  Description of Artificial Sequence: Synthetic oligonucleotide
gttacaatgagcatacagaagc

SEQ ID NO: 5004 - DNA, 25 bp, Artificial Sequence
  Description of Artificial Sequence: Synthetic oligonucleotide
ttctagacatactcaaacaaacaaa

SEQ ID NO: 5005 - DNA, 22 bp, Artificial Sequence
  Description of Artificial Sequence: Synthetic oligonucleotide
acacagttattgtcattcctgg

SEQ ID NO: 5006 - DNA, 21 bp, Artificial Sequence
  Description of Artificial Sequence: Synthetic oligonucleotide
catttccctagctagatccag

SEQ ID NO: 5007 - DNA, 24 bp, Artificial Sequence
  Description of Artificial Sequence: Synthetic oligonucleotide
tatatttcaaaaaacttgtttccg

SEQ ID NO: 5008 - DNA, 21 bp, Artificial Sequence
  Description of Artificial Sequence: Synthetic oligonucleotide
ctgacctgtgattactgggat

SEQ ID NO: 5009 - DNA, 22 bp, Artificial Sequence
  Description of Artificial Sequence: Synthetic oligonucleotide
agcagtggcaagtaggaagtag

SEQ ID NO: 5010 - DNA, 24 bp, Artificial Sequence
  Description of Artificial Sequence: Synthetic oligonucleotide
tttcatcatatgtccaagtgttac

SEQ ID NO: 5011 - DNA, 23 bp, Artificial Sequence
  Description of Artificial Sequence: Synthetic oligonucleotide
aggctacagtccacatctttaac

SEQ ID NO: 5012 - DNA, 21 bp, Artificial Sequence
  Description of Artificial Sequence: Synthetic oligonucleotide
caggttagaaaaccctcacag

SEQ ID NO: 5013 - DNA, 23 bp, Artificial Sequence
  Description of Artificial Sequence: Synthetic oligonucleotide
gtggatgtgatttctagtttcag

SEQ ID NO: 5014 - DNA, 21 bp, Artificial Sequence
  Description of Artificial Sequence: Synthetic oligonucleotide
gcaactcaggaacagctatct

SEQ ID NO: 5015 - DNA, 24 bp, Artificial Sequence
  Description of Artificial Sequence: Synthetic oligonucleotide
gagttctctggtttattcaaatca

SEQ ID NO: 5016 - DNA, 23 bp, Artificial Sequence
  Description of Artificial Sequence: Synthetic oligonucleotide
gaacaggtgcatagaaaagaata

SEQ ID NO: 5017 - DNA, 21 bp, Artificial Sequence
  Description of Artificial Sequence: Synthetic oligonucleotide
agaaaggtgagaaatcctgtg

SEQ ID NO: 5018 - DNA, 21 bp, Artificial Sequence
  Description of Artificial Sequence: Synthetic oligonucleotide
atgtgctttgagcttgatttt

SEQ ID NO: 5019 - DNA, 22 bp, Artificial Sequence
  Description of Artificial Sequence: Synthetic oligonucleotide
acttgtggaaatgggaatctta

SEQ ID NO: 5020 - DNA, 21 bp, Artificial Sequence
  Description of Artificial Sequence: Synthetic oligonucleotide
ggagtctctcagttccttctc

SEQ ID NO: 5021 - DNA, 23 bp, Artificial Sequence
  Description of Artificial Sequence: Synthetic oligonucleotide
cagatctttgtgaagaatactgc

SEQ ID NO: 5022 - DNA, 22 bp, Artificial Sequence
  Description of Artificial Sequence: Synthetic oligonucleotide
taccaaccttactcatcagtgc

SEQ ID NO: 5023 - DNA, 22 bp, Artificial Sequence
  Description of Artificial Sequence: Synthetic oligonucleotide
atagcagagggcatttatcagt

SEQ ID NO: 5024 - DNA, 23 bp, Artificial Sequence
  Description of Artificial Sequence: Synthetic oligonucleotide
tattgttgtggcttgtatgtctt

SEQ ID NO: 5025 - DNA, 21 bp, Artificial Sequence
  Description of Artificial Sequence: Synthetic oligonucleotide
ccttccattctttacccttct

SEQ ID NO: 5026 - DNA, 24 bp, Artificial Sequence
  Description of Artificial Sequence: Synthetic oligonucleotide
cataaaattcagtcagaaagtacc

SEQ ID NO: 5027 - DNA, 22 bp, Artificial Sequence
  Description of Artificial Sequence: Synthetic oligonucleotide
gtgagtcacagtgagaggtcag

SEQ ID NO: 5028 - DNA, 22 bp, Artificial Sequence
  Description of Artificial Sequence: Synthetic oligonucleotide
aatcctggagtacagatgtttc

SEQ ID NO: 5029 - DNA, 22 bp, Artificial Sequence
  Description of Artificial Sequence: Synthetic oligonucleotide
ttgttccaaaatccagattcta

SEQ ID NO: 5030 - DNA, 25 bp, Artificial Sequence
  Description of Artificial Sequence: Synthetic oligonucleotide
aagattagaatctactacgctcagc

SEQ ID NO: 5031 - DNA, 21 bp, Artificial Sequence
  Description of Artificial Sequence: Synthetic oligonucleotide
cctacgcctctagaggtctct

SEQ ID NO: 5032 - DNA, 23 bp, Artificial Sequence
  Description of Artificial Sequence: Synthetic oligonucleotide
gtaaccacaagttcacttcagtg

SEQ ID NO: 5033 - DNA, 22 bp, Artificial Sequence
  Description of Artificial Sequence: Synthetic oligonucleotide
gtttagtaactgctggcattcc

SEQ ID NO: 5034 - DNA, 22 bp, Artificial Sequence
  Description of Artificial Sequence: Synthetic oligonucleotide
gaaaaaatctgtgttgaacaag

SEQ ID NO: 5035 - DNA, 24 bp, Artificial Sequence
  Description of Artificial Sequence: Synthetic oligonucleotide
aatcaatttcagaacattttcatc

SEQ ID NO: 5036 - DNA, 21 bp, Artificial Sequence
  Description of Artificial Sequence: Synthetic oligonucleotide
ttaagaagatatggccacaca

SEQ ID NO: 5037 - DNA, 22 bp, Artificial Sequence
  Description of Artificial Sequence: Synthetic oligonucleotide
catgagatcttagaggaacctc

SEQ ID NO: 5038 - DNA, 22 bp, Artificial Sequence
  Description of Artificial Sequence: Synthetic oligonucleotide
ggatggtacaagatggtagatg

SEQ ID NO: 5039 - DNA, 21 bp, Artificial Sequence
  Description of Artificial Sequence: Synthetic oligonucleotide
gtttattcacactgtgagggg

SEQ ID NO: 5040 - DNA, 24 bp, Artificial Sequence
  Description of Artificial Sequence: Synthetic oligonucleotide
ggatatggtttgtaatttgtaatg

SEQ ID NO: 5041 - DNA, 24 bp, Artificial Sequence
  Description of Artificial Sequence: Synthetic oligonucleotide
cagagattatcatggattattcag

SEQ ID NO: 5042 - DNA, 24 bp, Artificial Sequence
  Description of Artificial Sequence: Synthetic oligonucleotide
tctgtttataggagaaaaaaacaa

SEQ ID NO: 5043 - DNA, 21 bp, Artificial Sequence
  Description of Artificial Sequence: Synthetic oligonucleotide
ctgaagtggggttaatgacac

SEQ ID NO: 5044 - DNA, 21 bp, Artificial Sequence
  Description of Artificial Sequence: Synthetic oligonucleotide
ctagtaggtccttcgtcctcc

SEQ ID NO: 5045 - DNA, 22 bp, Artificial Sequence
  Description of Artificial Sequence: Synthetic oligonucleotide
aggagggtagaagatggtaggt

SEQ ID NO: 5046 - DNA, 23 bp, Artificial Sequence
  Description of Artificial Sequence: Synthetic oligonucleotide
aagtgcaaagagtgtttctgtat

SEQ ID NO: 5047 - DNA, 22 bp, Artificial Sequence
  Description of Artificial Sequence: Synthetic oligonucleotide
gatgagtgacaagatagagccc

SEQ ID NO: 5048 - DNA, 21 bp, Artificial Sequence
  Description of Artificial Sequence: Synthetic oligonucleotide
ccaactgtagctcaaggactc

SEQ ID NO: 5049 - DNA, 25 bp, Artificial Sequence
  Description of Artificial Sequence: Synthetic oligonucleotide
acttcccttctaagatacaattctg

SEQ ID NO: 5050 - DNA, 22 bp, Artificial Sequence
  Description of Artificial Sequence: Synthetic oligonucleotide
aggatacagaaacactctttgc

SEQ ID NO: 5051 - DNA, 21 bp, Artificial Sequence
  Description of Artificial Sequence: Synthetic oligonucleotide
ggaagataaactggctaaagg

SEQ ID NO: 5052 - DNA, 23 bp, Artificial Sequence
  Description of Artificial Sequence: Synthetic oligonucleotide
catatgatgaattcaggagaact

SEQ ID NO: 5053 - DNA, 23 bp, Artificial Sequence
  Description of Artificial Sequence: Synthetic oligonucleotide
gtgcagaatcacatgacaatact

SEQ ID NO: 5054 - DNA, 21 bp, Artificial Sequence
  Description of Artificial Sequence: Synthetic oligonucleotide
atcttcaaaaataaccccatg

SEQ ID NO: 5055 - DNA, 24 bp, Artificial Sequence
  Description of Artificial Sequence: Synthetic oligonucleotide
cctaaccaagtgaagtaggttaag

SEQ ID NO: 5056 - DNA, 22 bp, Artificial Sequence
  Description of Artificial Sequence: Synthetic oligonucleotide
ggacactgggtaaagtggaata

SEQ ID NO: 5057 - DNA, 24 bp, Artificial Sequence
  Description of Artificial Sequence: Synthetic oligonucleotide
agttgatgtttactggacgttatt

SEQ ID NO: 5058 - DNA, 22 bp, Artificial Sequence
  Description of Artificial Sequence: Synthetic oligonucleotide
atgtcttttgcattttgaatca

SEQ ID NO: 5059 - DNA, 21 bp, Artificial Sequence
  Description of Artificial Sequence: Synthetic oligonucleotide
tggcatgtttatatgctgatt

SEQ ID NO: 5060 - DNA, 21 bp, Artificial Sequence
  Description of Artificial Sequence: Synthetic oligonucleotide
gaatgaaaaccacacatcaac

SEQ ID NO: 5061 - DNA, 23 bp, Artificial Sequence
  Description of Artificial Sequence: Synthetic oligonucleotide
gttttcaggaacaaatagctctg

SEQ ID NO: 5062 - DNA, 21 bp, Artificial Sequence
  Description of Artificial Sequence: Synthetic oligonucleotide
ttttgttctaccccaatcact

SEQ ID NO: 5063 - DNA, 25 bp, Artificial Sequence
  Description of Artificial Sequence: Synthetic oligonucleotide
ctctgttttctgtactctgtctctc

SEQ ID NO: 5064 - DNA, 21 bp, Artificial Sequence
  Description of Artificial Sequence: Synthetic oligonucleotide
catcaaggactgttctttcct

SEQ ID NO: 5065 - DNA, 23 bp, Artificial Sequence
  Description of Artificial Sequence: Synthetic oligonucleotide
atttcagatacaaggaaaactgg

SEQ ID NO: 5066 - DNA, 21 bp, Artificial Sequence
  Description of Artificial Sequence: Synthetic oligonucleotide
gggtgtccattaaaatgattg

SEQ ID NO: 5067 - DNA, 21 bp, Artificial Sequence
  Description of Artificial Sequence: Synthetic oligonucleotide
tattaaagggtagggagcagg

SEQ ID NO: 5068 - DNA, 24 bp, Artificial Sequence
  Description of Artificial Sequence: Synthetic oligonucleotide
gggttagtaagaacttctcttttt

SEQ ID NO: 5069 - DNA, 23 bp, Artificial Sequence
  Description of Artificial Sequence: Synthetic oligonucleotide
aataacagcagtgtctttatccc

SEQ ID NO: 5070 - DNA, 22 bp, Artificial Sequence
  Description of Artificial Sequence: Synthetic oligonucleotide
gaagagagaagagggatgatca

SEQ ID NO: 5071 - DNA, 21 bp, Artificial Sequence
  Description of Artificial Sequence: Synthetic oligonucleotide
tactttcccacttgaaaagtg

SEQ ID NO: 5072 - DNA, 23 bp, Artificial Sequence
  Description of Artificial Sequence: Synthetic oligonucleotide
cttctctaccagtcagtatggtg

SEQ ID NO: 5073 - DNA, 21 bp, Artificial Sequence
  Description of Artificial Sequence: Synthetic oligonucleotide
tcactcatagtgcttcaccac

SEQ ID NO: 5074 - DNA, 24 bp, Artificial Sequence
  Description of Artificial Sequence: Synthetic oligonucleotide
cattgcactagaattactgtgaga

SEQ ID NO: 5075 - DNA, 23 bp, Artificial Sequence
  Description of Artificial Sequence: Synthetic oligonucleotide
agaaaaactgagcaaataacatg

SEQ ID NO: 5076 - DNA, 22 bp, Artificial Sequence
  Description of Artificial Sequence: Synthetic oligonucleotide
atatggagatatctgagggagg

SEQ ID NO: 5077 - DNA, 21 bp, Artificial Sequence
  Description of Artificial Sequence: Synthetic oligonucleotide
acccaggactgaatcaatatc

SEQ ID NO: 5078 - DNA, 23 bp, Artificial Sequence
  Description of Artificial Sequence: Synthetic oligonucleotide
caagtcatctaattcagaggatg

SEQ ID NO: 5079 - DNA, 21 bp, Artificial Sequence
  Description of Artificial Sequence: Synthetic oligonucleotide
ggggaccaaaaaatttatctt

SEQ ID NO: 5080 - DNA, 21 bp, Artificial Sequence
  Description of Artificial Sequence: Synthetic oligonucleotide
tagctttaccccagccttaac

SEQ ID NO: 5081 - DNA, 21 bp, Artificial Sequence
  Description of Artificial Sequence: Synthetic oligonucleotide
actgatcctttgtgaaggatg

SEQ ID NO: 5082 - DNA, 24 bp, Artificial Sequence
  Description of Artificial Sequence: Synthetic oligonucleotide
gctgttcatagaacaactcttttt

SEQ ID NO: 5083 - DNA, 24 bp, Artificial Sequence
  Description of Artificial Sequence: Synthetic oligonucleotide
tgattttagaattctaggtttgtg

SEQ ID NO: 5084 - DNA, 21 bp, Artificial Sequence
  Description of Artificial Sequence: Synthetic oligonucleotide
gaaaaataaaacatgatcccc

SEQ ID NO: 5085 - DNA, 22 bp, Artificial Sequence
  Description of Artificial Sequence: Synthetic oligonucleotide
atggcctaatttggttagattt

SEQ ID NO: 5086 - DNA, 26 bp, Artificial Sequence
  Description of Artificial Sequence: Synthetic oligonucleotide
tatatttctcttcaggaacaataacc

SEQ ID NO: 5087 - DNA, 22 bp, Artificial Sequence
  Description of Artificial Sequence: Synthetic oligonucleotide
aggactatgctctagaaatggg

SEQ ID NO: 5088 - DNA, 22 bp, Artificial Sequence
  Description of Artificial Sequence: Synthetic oligonucleotide
aggatcccagagaaaggaagta

SEQ ID NO: 5089 - DNA, 21 bp, Artificial Sequence
  Description of Artificial Sequence: Synthetic oligonucleotide
gcacaatattgcttctggttt

SEQ ID NO: 5090 - DNA, 22 bp, Artificial Sequence
  Description of Artificial Sequence: Synthetic oligonucleotide
cttactcttttgtgcagcacat

SEQ ID NO: 5091 - DNA, 23 bp, Artificial Sequence
  Description of Artificial Sequence: Synthetic oligonucleotide
tcctactaagaaactcccctcat

SEQ ID NO: 5092 - DNA, 22 bp, Artificial Sequence
  Description of Artificial Sequence: Synthetic oligonucleotide
cgttcaagtctgaatcttcatt

SEQ ID NO: 5093 - DNA, 21 bp, Artificial Sequence
  Description of Artificial Sequence: Synthetic oligonucleotide
ggagatgcagctccttaattt

SEQ ID NO: 5094 - DNA, 23 bp, Artificial Sequence
  Description of Artificial Sequence: Synthetic oligonucleotide
agtatctggtagggattcagagt

SEQ ID NO: 5095 - DNA, 21 bp, Artificial Sequence
  Description of Artificial Sequence: Synthetic oligonucleotide
tgggattgaattaaaacagct

SEQ ID NO: 5096 - DNA, 23 bp, Artificial Sequence
  Description of Artificial Sequence: Synthetic oligonucleotide
ctgaagattttgtgttattcatg

SEQ ID NO: 5097 - DNA, 24 bp, Artificial Sequence
  Description of Artificial Sequence: Synthetic oligonucleotide
tacaggtgtccttctttatacctg

SEQ ID NO: 5098 - DNA, 24 bp, Artificial Sequence
  Description of Artificial Sequence: Synthetic oligonucleotide
ctgtactcatgttacaggttaggg

SEQ ID NO: 5099 - DNA, 23 bp, Artificial Sequence
  Description of Artificial Sequence: Synthetic oligonucleotide
agtagccttcaaaacattttctt

SEQ ID NO: 5100 - DNA, 21 bp, Artificial Sequence
  Description of Artificial Sequence: Synthetic oligonucleotide
caatgttgcaagacaaaagtg

SEQ ID NO: 5101 - DNA, 21 bp, Artificial Sequence
  Description of Artificial Sequence: Synthetic oligonucleotide
gtggtcctgctaatgtgagtc

SEQ ID NO: 5102 - DNA, 22 bp, Artificial Sequence
  Description of Artificial Sequence: Synthetic oligonucleotide
gtactgtgagacaacacccttg

SEQ ID NO: 5103 - DNA, 21 bp, Artificial Sequence
  Description of Artificial Sequence: Synthetic oligonucleotide
catatgttgacacatggtctg

SEQ ID NO: 5104 - DNA, 24 bp, Artificial Sequence
  Description of Artificial Sequence: Synthetic oligonucleotide
taatgtacctctaaaatgaacagc

SEQ ID NO: 5105 - DNA, 22 bp, Artificial Sequence
  Description of Artificial Sequence: Synthetic oligonucleotide
attctgctcatcttgttcctgt

SEQ ID NO: 5106 - DNA, 21 bp, Artificial Sequence
  Description of Artificial Sequence: Synthetic oligonucleotide
tagaggcctctaatccatcct

SEQ ID NO: 5107 - DNA, 22 bp, Artificial Sequence
  Description of Artificial Sequence: Synthetic oligonucleotide
gcttgcaaaggtttagtaaaaa

SEQ ID NO: 5108 - DNA, 21 bp, Artificial Sequence
  Description of Artificial Sequence: Synthetic oligonucleotide
tggtctctccatcttcacact

SEQ ID NO: 5109 - DNA, 26 bp, Artificial Sequence
  Description of Artificial Sequence: Synthetic oligonucleotide
aaacctgagtatatagaggatttagg

SEQ ID NO: 5110 - DNA, 21 bp, Artificial Sequence
  Description of Artificial Sequence: Synthetic oligonucleotide
agggaagaggcttcataattg

SEQ ID NO: 5111 - DNA, 22 bp, Artificial Sequence
  Description of Artificial Sequence: Synthetic oligonucleotide
tgcaaaggatttgatttgttac

SEQ ID NO: 5112 - DNA, 21 bp, Artificial Sequence
  Description of Artificial Sequence: Synthetic oligonucleotide
gtcaggaatggaaaccctatt

SEQ ID NO: 5113 - DNA, 21 bp, Artificial Sequence
  Description of Artificial Sequence: Synthetic oligonucleotide
tctcctcattcttaaggcctt

SEQ ID NO: 5114 - DNA, 21 bp, Artificial Sequence
  Description of Artificial Sequence: Synthetic oligonucleotide
ttcaatgaaaggagagcaaga

SEQ ID NO: 5115 - DNA, 23 bp, Artificial Sequence
  Description of Artificial Sequence: Synthetic oligonucleotide
aggaaaagaacatttaggctttt

SEQ ID NO: 5116 - DNA, 21 bp, Artificial Sequence
  Description of Artificial Sequence: Synthetic oligonucleotide
cagtctattcgtccagaggaa

SEQ ID NO: 5117 - DNA, 25 bp, Artificial Sequence
  Description of Artificial Sequence: Synthetic oligonucleotide
ctattatctaattgggaagattttc

SEQ ID NO: 5118 - DNA, 21 bp, Artificial Sequence
  Description of Artificial Sequence: Synthetic oligonucleotide
agcttggaaaggaggtaacac

SEQ ID NO: 5119 - DNA, 22 bp, Artificial Sequence
  Description of Artificial Sequence: Synthetic oligonucleotide
ctgtgctctgacatcctcagta

SEQ ID NO: 5120 - DNA, 23 bp, Artificial Sequence
  Description of Artificial Sequence: Synthetic oligonucleotide
aggccacgtacagtgtcatatat

SEQ ID NO: 5121 - DNA, 23 bp, Artificial Sequence
  Description of Artificial Sequence: Synthetic oligonucleotide
attagtgctaccaaagtgtcatt

SEQ ID NO: 5122 - DNA, 22 bp, Artificial Sequence
  Description of Artificial Sequence: Synthetic oligonucleotide
tcttgttttatgtggttgagag

SEQ ID NO: 5123 - DNA, 23 bp, Artificial Sequence
  Description of Artificial Sequence: Synthetic oligonucleotide
gagtcagaagttcaacagaagtc

SEQ ID NO: 5124 - DNA, 21 bp, Artificial Sequence
  Description of Artificial Sequence: Synthetic oligonucleotide
ggaagtcaggataaatttggc

SEQ ID NO: 5125 - DNA, 21 bp, Artificial Sequence
  Description of Artificial Sequence: Synthetic oligonucleotide
tagataaccgccacaattgtt

SEQ ID NO: 5126 - DNA, 23 bp, Artificial Sequence
  Description of Artificial Sequence: Synthetic oligonucleotide
tgtctcctttgctatactgaaag

SEQ ID NO: 5127 - DNA, 21 bp, Artificial Sequence
  Description of Artificial Sequence: Synthetic oligonucleotide
gagttcagaagagtcacggtg

SEQ ID NO: 5128 - DNA, 21 bp, Artificial Sequence
  Description of Artificial Sequence: Synthetic oligonucleotide
aagccaaaccagaagcaatat

SEQ ID NO: 5129 - DNA, 21 bp, Artificial Sequence
  Description of Artificial Sequence: Synthetic oligonucleotide
caaacaccaggagctagaaga

SEQ ID NO: 5130 - DNA, 21 bp, Artificial Sequence
  Description of Artificial Sequence: Synthetic oligonucleotide
atttctcatctcatttctggg

SEQ ID NO: 5131 - DNA, 21 bp, Artificial Sequence
  Description of Artificial Sequence: Synthetic oligonucleotide
ttcctctgtgtgtggatctag

SEQ ID NO: 5132 - DNA, 24 bp, Artificial Sequence
  Description of Artificial Sequence: Synthetic oligonucleotide
aacatatctgtaaacttcaaggaa

SEQ ID NO: 5133 - DNA, 23 bp, Artificial Sequence
  Description of Artificial Sequence: Synthetic oligonucleotide
gttccttgttctttattgtcctc

SEQ ID NO: 5134 - DNA, 22 bp, Artificial Sequence
  Description of Artificial Sequence: Synthetic oligonucleotide
taaccaattgggtgtttctgta

SEQ ID NO: 5135 - DNA, 22 bp, Artificial Sequence
  Description of Artificial Sequence: Synthetic oligonucleotide
tctaaactgtgaaaccctgttc

SEQ ID NO: 5136 - DNA, 22 bp, Artificial Sequence
  Description of Artificial Sequence: Synthetic oligonucleotide
aaaaagcaggtcaaactgtgat

SEQ ID NO: 5137 - DNA, 22 bp, Artificial Sequence
  Description of Artificial Sequence: Synthetic oligonucleotide
aaaaagcaggtcaaactgtgat

SEQ ID NO: 5138 - DNA, 21 bp, Artificial Sequence
  Description of Artificial Sequence: Synthetic oligonucleotide
tattgtattggagggtgacca

SEQ ID NO: 5139 - DNA, 21 bp, Artificial Sequence
  Description of Artificial Sequence: Synthetic oligonucleotide
aggaacagagggtgtgagaat

SEQ ID NO: 5140 - DNA, 21 bp, Artificial Sequence
  Description of Artificial Sequence: Synthetic oligonucleotide
actctccctgaccctaactct

SEQ ID NO: 5141 - DNA, 23 bp, Artificial Sequence
  Description of Artificial Sequence: Synthetic oligonucleotide
ggtttttcacgtctaatctcaat

SEQ ID NO: 5142 - DNA, 21 bp, Artificial Sequence
  Description of Artificial Sequence: Synthetic oligonucleotide
tctcccactaggatgtaggct

SEQ ID NO: 5143 - DNA, 23 bp, Artificial Sequence
  Description of Artificial Sequence: Synthetic oligonucleotide
agtacctggaagagaagaagaac

SEQ ID NO: 5144 - DNA, 24 bp, Artificial Sequence
  Description of Artificial Sequence: Synthetic oligonucleotide
aagggcttaaatagagaagtaaag

SEQ ID NO: 5145 - DNA, 21 bp, Artificial Sequence
  Description of Artificial Sequence: Synthetic oligonucleotide
actgtttagaggctgaagcag

SEQ ID NO: 5146 - DNA, 21 bp, Artificial Sequence
  Description of Artificial Sequence: Synthetic oligonucleotide
cacacactttgagaaagaggg

SEQ ID NO: 5147 - DNA, 21 bp, Artificial Sequence
  Description of Artificial Sequence: Synthetic oligonucleotide
gccttaactgttacctagccc

SEQ ID NO: 5148 - DNA, 22 bp, Artificial Sequence
  Description of Artificial Sequence: Synthetic oligonucleotide
agaacacagacctttcaaggac

SEQ ID NO: 5149 - DNA, 22 bp, Artificial Sequence
  Description of Artificial Sequence: Synthetic oligonucleotide
agaaagatctctgaagtgctca

SEQ ID NO: 5150 - DNA, 25 bp, Artificial Sequence
  Description of Artificial Sequence: Synthetic oligonucleotide
acttagaaataaatgcttgttgatt

SEQ ID NO: 5151 - DNA, 23 bp, Artificial Sequence
  Description of Artificial Sequence: Synthetic oligonucleotide
ctagaactatacgtcccagaaca

SEQ ID NO: 5152 - DNA, 23 bp, Artificial Sequence
  Description of Artificial Sequence: Synthetic oligonucleotide
tgcatgtaattactgcacataca

SEQ ID NO: 5153 - DNA, 21 bp, Artificial Sequence
  Description of Artificial Sequence: Synthetic oligonucleotide
accaggaaggactaggctaca

SEQ ID NO: 5154 - DNA, 22 bp, Artificial Sequence
  Description of Artificial Sequence: Synthetic oligonucleotide
tgtgtcctgatgctcttatcac

SEQ ID NO: 5155 - DNA, 24 bp, Artificial Sequence
  Description of Artificial Sequence: Synthetic oligonucleotide
gaagacagacatgaataaatcatt

SEQ ID NO: 5156 - DNA, 22 bp, Artificial Sequence
  Description of Artificial Sequence: Synthetic oligonucleotide
ttggtatgggttcactgaaaat

SEQ ID NO: 5157 - DNA, 22 bp, Artificial Sequence
  Description of Artificial Sequence: Synthetic oligonucleotide
ttacccttctgagatcaggaag

SEQ ID NO: 5158 - DNA, 26 bp, Artificial Sequence
  Description of Artificial Sequence: Synthetic oligonucleotide
aaacagagtaaataaaggataagagc

SEQ ID NO: 5159 - DNA, 23 bp, Artificial Sequence
  Description of Artificial Sequence: Synthetic oligonucleotide
agagacagtttcttcttcttcct

SEQ ID NO: 5160 - DNA, 22 bp, Artificial Sequence
  Description of Artificial Sequence: Synthetic oligonucleotide
caggtttgtcaatttgtgacat

SEQ ID NO: 5161 - DNA, 21 bp, Artificial Sequence
  Description of Artificial Sequence: Synthetic oligonucleotide
atctgaggatccagctcaagt

SEQ ID NO: 5162 - DNA, 21 bp, Artificial Sequence
  Description of Artificial Sequence: Synthetic oligonucleotide
ctgggctccaagatcttaaag

SEQ ID NO: 5163 - DNA, 21 bp, Artificial Sequence
  Description of Artificial Sequence: Synthetic oligonucleotide
ccattgttaatggtttgagga

SEQ ID NO: 5164 - DNA, 22 bp, Artificial Sequence
  Description of Artificial Sequence: Synthetic oligonucleotide
tgtcaagggtaacagaggtcat

SEQ ID NO: 5165 - DNA, 21 bp, Artificial Sequence
  Description of Artificial Sequence: Synthetic oligonucleotide
catcatctctcctttgctctg

SEQ ID NO: 5166 - DNA, 23 bp, Artificial Sequence
  Description of Artificial Sequence: Synthetic oligonucleotide
actgtaaaaacattgatgaaagg

SEQ ID NO: 5167 - DNA, 20 bp, Artificial Sequence
  Description of Artificial Sequence: Synthetic oligonucleotide
ttgatgtttgctgttcctct

SEQ ID NO: 5168 - DNA, 21 bp, Artificial Sequence
  Description of Artificial Sequence: Synthetic oligonucleotide
gatgatagcagctctcctacg

SEQ ID NO: 5169 - DNA, 25 bp, Artificial Sequence
  Description of Artificial Sequence: Synthetic oligonucleotide
ctattaagtacttacgaatcctcaa

SEQ ID NO: 5170 - DNA, 21 bp, Artificial Sequence
  Description of Artificial Sequence: Synthetic oligonucleotide
tggtttgttgggagatctcta

SEQ ID NO: 5171 - DNA, 21 bp, Artificial Sequence
  Description of Artificial Sequence: Synthetic oligonucleotide
caagcctctgagtgttgatgt

SEQ ID NO: 5172 - DNA, 23 bp, Artificial Sequence
  Description of Artificial Sequence: Synthetic oligonucleotide
acatttcaaaagagaagactgct

SEQ ID NO: 5173 - DNA, 21 bp, Artificial Sequence
  Description of Artificial Sequence: Synthetic oligonucleotide
gatgaaaagtgaagggagagg

SEQ ID NO: 5174 - DNA, 23 bp, Artificial Sequence
  Description of Artificial Sequence: Synthetic oligonucleotide
catttcttcacttaaaagcctct

SEQ ID NO: 5175 - DNA, 24 bp, Artificial Sequence
  Description of Artificial Sequence: Synthetic oligonucleotide
ctgggctttagaattatttctagt

SEQ ID NO: 5176 - DNA, 20 bp, Artificial Sequence
  Description of Artificial Sequence: Synthetic oligonucleotide
aggaaaaatggctttttttc

SEQ ID NO: 5177 - DNA, 21 bp, Artificial Sequence
  Description of Artificial Sequence: Synthetic oligonucleotide
acaggttccactatctgaccc

SEQ ID NO: 5178 - DNA, 20 bp, Artificial Sequence
  Description of Artificial Sequence: Synthetic oligonucleotide
tccacaagaaacaaacttcc

SEQ ID NO: 5179 - DNA, 22 bp, Artificial Sequence
  Description of Artificial Sequence: Synthetic oligonucleotide
gacctccttctaaacactcgag

SEQ ID NO: 5180 - DNA, 20 bp, Artificial Sequence
  Description of Artificial Sequence: Synthetic oligonucleotide
gaacactgtgagggtcaaat

SEQ ID NO: 5181 - DNA, 22 bp, Artificial Sequence
  Description of Artificial Sequence: Synthetic oligonucleotide
tggagtagaacaaaaacaggac

SEQ ID NO: 5182 - DNA, 22 bp, Artificial Sequence
  Description of Artificial Sequence: Synthetic oligonucleotide
ctccaggtaagaacagagcaat

SEQ ID NO: 5183 - DNA, 21 bp, Artificial Sequence
  Description of Artificial Sequence: Synthetic oligonucleotide
caacggatgaatggaaaataa

SEQ ID NO: 5184 - DNA, 20 bp, Artificial Sequence
  Description of Artificial Sequence: Synthetic oligonucleotide
gcttttccctttctctcttc

SEQ ID NO: 5185 - DNA, 24 bp, Artificial Sequence
  Description of Artificial Sequence: Synthetic oligonucleotide
tttctttcatgataatagttgctt

SEQ ID NO: 5186 - DNA, 22 bp, Artificial Sequence
  Description of Artificial Sequence: Synthetic oligonucleotide
acttggaaagcgagtaagtgag

SEQ ID NO: 5187 - DNA, 23 bp, Artificial Sequence
  Description of Artificial Sequence: Synthetic oligonucleotide
aagtagtgagagctgacatcctc

SEQ ID NO: 5188 - DNA, 24 bp, Artificial Sequence
  Description of Artificial Sequence: Synthetic oligonucleotide
ctacattttagctcattccctagt

SEQ ID NO: 5189 - DNA, 21 bp, Artificial Sequence
  Description of Artificial Sequence: Synthetic oligonucleotide
tctcttgttatgtctttgccc

SEQ ID NO: 5190 - DNA, 20 bp, Artificial Sequence
  Description of Artificial Sequence: Synthetic oligonucleotide
atttggactggagtttcctt

SEQ ID NO: 5191 - DNA, 23 bp, Artificial Sequence
  Description of Artificial Sequence: Synthetic oligonucleotide
aactggggataaataacctctaa

SEQ ID NO: 5192 - DNA, 21 bp, Artificial Sequence
  Description of Artificial Sequence: Synthetic oligonucleotide
tgagcacagttacctctggag

SEQ ID NO: 5193 - DNA, 21 bp, Artificial Sequence
  Description of Artificial Sequence: Synthetic oligonucleotide
tcttcctcctacacatcacag

SEQ ID NO: 5194 - DNA, 22 bp, Artificial Sequence
  Description of Artificial Sequence: Synthetic oligonucleotide
tggtagacatgatttggacatc

SEQ ID NO: 5195 - DNA, 23 bp, Artificial Sequence
  Description of Artificial Sequence: Synthetic oligonucleotide
gaaatgtgtcattaggtgatttc

SEQ ID NO: 5196 - DNA, 21 bp, Artificial Sequence
  Description of Artificial Sequence: Synthetic oligonucleotide
aatcaaaacccaacatgattg

SEQ ID NO: 5197 - DNA, 21 bp, Artificial Sequence
  Description of Artificial Sequence: Synthetic oligonucleotide
gaaatctcaagggtgttgtct

SEQ ID NO: 5198 - DNA, 23 bp, Artificial Sequence
  Description of Artificial Sequence: Synthetic oligonucleotide
tatgctaaaacattgctgaatct

SEQ ID NO: 5199 - DNA, 22 bp, Artificial Sequence
  Description of Artificial Sequence: Synthetic oligonucleotide
tgggttcatgaaatatgtatcc

SEQ ID NO: 5200 - DNA, 21 bp, Artificial Sequence
  Description of Artificial Sequence: Synthetic oligonucleotide
gcaaggaaatccaaatggtat

SEQ ID NO: 5201 - DNA, 20 bp, Artificial Sequence
  Description of Artificial Sequence: Synthetic oligonucleotide
gtctccaactctgaagggag

SEQ ID NO: 5202 - DNA, 21 bp, Artificial Sequence
  Description of Artificial Sequence: Synthetic oligonucleotide
atctctggtttccacacacac

SEQ ID NO: 5203 - DNA, 20 bp, Artificial Sequence
  Description of Artificial Sequence: Synthetic oligonucleotide
tgagttggacattcagaggt

SEQ ID NO: 5204 - DNA, 21 bp, Artificial Sequence
  Description of Artificial Sequence: Synthetic oligonucleotide
ctctggttgtctccataacca

SEQ ID NO: 5205 - DNA, 24 bp, Artificial Sequence
  Description of Artificial Sequence: Synthetic oligonucleotide
cagataactcagaatcaggtttaa

SEQ ID NO: 5206 - DNA, 24 bp, Artificial Sequence
  Description of Artificial Sequence: Synthetic oligonucleotide
atttagacaagtactacaaccccc

SEQ ID NO: 5207 - DNA, 21 bp, Artificial Sequence
  Description of Artificial Sequence: Synthetic oligonucleotide
agactaactcttgcaggatgc

SEQ ID NO: 5208 - DNA, 21 bp, Artificial Sequence
  Description of Artificial Sequence: Synthetic oligonucleotide
atcagagccaggtatttcagg

SEQ ID NO: 5209 - DNA, 21 bp, Artificial Sequence
  Description of Artificial Sequence: Synthetic oligonucleotide
ctgagagcttcactagggctt

SEQ ID NO: 5210 - DNA, 20 bp, Artificial Sequence
  Description of Artificial Sequence: Synthetic oligonucleotide
ccatttttcctttctcacac

SEQ ID NO: 5211 - DNA, 22 bp, Artificial Sequence
  Description of Artificial Sequence: Synthetic oligonucleotide
tgaccttgcctaaaagactaat

SEQ ID NO: 5212 - DNA, 21 bp, Artificial Sequence
  Description of Artificial Sequence: Synthetic oligonucleotide
cctctctgaacatgaggcata

SEQ ID NO: 5213 - DNA, 20 bp, Artificial Sequence
  Description of Artificial Sequence: Synthetic oligonucleotide
ccacacttggagaaagaaac

SEQ ID NO: 5214 - DNA, 24 bp, Artificial Sequence
  Description of Artificial Sequence: Synthetic oligonucleotide
tggtgatgctttaatctaaatagt

SEQ ID NO: 5215 - DNA, 25 bp, Artificial Sequence
  Description of Artificial Sequence: Synthetic oligonucleotide
tttgaaaaacaatctaacttttact

SEQ ID NO: 5216 - DNA, 21 bp, Artificial Sequence
  Description of Artificial Sequence: Synthetic oligonucleotide
ctttgaacacatgttgctcat

SEQ ID NO: 5217 - DNA, 21 bp, Artificial Sequence
  Description of Artificial Sequence: Synthetic oligonucleotide
ctgatcattagggctggaaat

SEQ ID NO: 5218 - DNA, 24 bp, Artificial Sequence
  Description of Artificial Sequence: Synthetic oligonucleotide
tatgtcagcattaccagttagaag

SEQ ID NO: 5219 - DNA, 20 bp, Artificial Sequence
  Description of Artificial Sequence: Synthetic oligonucleotide
tgcctcagatggttatcaag

SEQ ID NO: 5220 - DNA, 20 bp, Artificial Sequence
  Description of Artificial Sequence: Synthetic oligonucleotide
ttttaagtgcaccaccactt

SEQ ID NO: 5221 - DNA, 21 bp, Artificial Sequence
  Description of Artificial Sequence: Synthetic oligonucleotide
aggtctacaggagatcaggga

SEQ ID NO: 5222 - DNA, 20 bp, Artificial Sequence
  Description of Artificial Sequence: Synthetic oligonucleotide
taaccttgccattaacaagc

SEQ ID NO: 5223 - DNA, 23 bp, Artificial Sequence
  Description of Artificial Sequence: Synthetic oligonucleotide
taagccactcagctacctaattc

SEQ ID NO: 5224 - DNA, 20 bp, Artificial Sequence
  Description of Artificial Sequence: Synthetic oligonucleotide
gaatcccagcttattcattg

SEQ ID NO: 5225 - DNA, 21 bp, Artificial Sequence
  Description of Artificial Sequence: Synthetic oligonucleotide
gttgaaaccaatgacgatgag

SEQ ID NO: 5226 - DNA, 21 bp, Artificial Sequence
  Description of Artificial Sequence: Synthetic oligonucleotide
cctcaaagagaagcagtaatt

SEQ ID NO: 5227 - DNA, 25 bp, Artificial Sequence
  Description of Artificial Sequence: Synthetic oligonucleotide
atttttgctaaatatttatcttcct

SEQ ID NO: 5228 - DNA, 22 bp, Artificial Sequence
  Description of Artificial Sequence: Synthetic oligonucleotide
atgttgctgagaccattgctat

SEQ ID NO: 5229 - DNA, 21 bp, Artificial Sequence
  Description of Artificial Sequence: Synthetic oligonucleotide
ttttgcatcctctgattcagt

SEQ ID NO: 5230 - DNA, 21 bp, Artificial Sequence
  Description of Artificial Sequence: Synthetic oligonucleotide
cactgtcagtgattggggtag

SEQ ID NO: 5231 - DNA, 20 bp, Artificial Sequence
  Description of Artificial Sequence: Synthetic oligonucleotide
catgtttggtgtcttcatcc

SEQ ID NO: 5232 - DNA, 22 bp, Artificial Sequence
  Description of Artificial Sequence: Synthetic oligonucleotide
gttgccagaagtcagattagag

SEQ ID NO: 5233 - DNA, 22 bp, Artificial Sequence
  Description of Artificial Sequence: Synthetic oligonucleotide
agcttgcaaatttcctgaatat

SEQ ID NO: 5234 - DNA, 21 bp, Artificial Sequence
  Description of Artificial Sequence: Synthetic oligonucleotide
cttctcagcttctcctttgct

SEQ ID NO: 5235 - DNA, 23 bp, Artificial Sequence
  Description of Artificial Sequence: Synthetic oligonucleotide
acaacaggagtgatttatattcc

SEQ ID NO: 5236 - DNA, 20 bp, Artificial Sequence
  Description of Artificial Sequence: Synthetic oligonucleotide
gcattactcaaaccttctgc

SEQ ID NO: 5237 - DNA, 22 bp, Artificial Sequence
  Description of Artificial Sequence: Synthetic oligonucleotide
ccttggacaattaaggagagaa

SEQ ID NO: 5238 - DNA, 24 bp, Artificial Sequence
  Description of Artificial Sequence: Synthetic oligonucleotide
gacttaatgatgcatttctgatat

SEQ ID NO: 5239 - DNA, 20 bp, Artificial Sequence
  Description of Artificial Sequence: Synthetic oligonucleotide
accacatctcagattgcatc

SEQ ID NO: 5240 - DNA, 20 bp, Artificial Sequence
  Description of Artificial Sequence: Synthetic oligonucleotide
gtaagcctctcgacttcagg

SEQ ID NO: 5241 - DNA, 20 bp, Artificial Sequence
  Description of Artificial Sequence: Synthetic oligonucleotide
tcagttggggtgagatagtc

SEQ ID NO: 5242 - DNA, 24 bp, Artificial Sequence
  Description of Artificial Sequence: Synthetic oligonucleotide
ccttaagtagatggaaaagagttt

SEQ ID NO: 5243 - DNA, 24 bp, Artificial Sequence
  Description of Artificial Sequence: Synthetic oligonucleotide
tgagacttaaattccttttgtact

SEQ ID NO: 5244 - DNA, 22 bp, Artificial Sequence
  Description of Artificial Sequence: Synthetic oligonucleotide
cttcctgcctacatgtatgtag

SEQ ID NO: 5245 - DNA, 23 bp, Artificial Sequence
  Description of Artificial Sequence: Synthetic oligonucleotide
agtagagtaggtggacatcacta

SEQ ID NO: 5246 - DNA, 25 bp, Artificial Sequence
  Description of Artificial Sequence: Synthetic oligonucleotide
ttgtagggattaaattaatttttct

SEQ ID NO: 5247 - DNA, 20 bp, Artificial Sequence
  Description of Artificial Sequence: Synthetic oligonucleotide
gaaaggtggacaaatcacag

SEQ ID NO: 5248 - DNA, 20 bp, Artificial Sequence
  Description of Artificial Sequence: Synthetic oligonucleotide
tcccttggtcttaaagcaat

SEQ ID NO: 5249 - DNA, 20 bp, Artificial Sequence
  Description of Artificial Sequence: Synthetic oligonucleotide
attccctctcttgagtgtgg

SEQ ID NO: 5250 - DNA, 21 bp, Artificial Sequence
  Description of Artificial Sequence: Synthetic oligonucleotide
atcctccccagaagagtctct

SEQ ID NO: 5251 - DNA, 24 bp, Artificial Sequence
  Description of Artificial Sequence: Synthetic oligonucleotide
acaaattatcacaaatattggctt

SEQ ID NO: 5252 - DNA, 20 bp, Artificial Sequence
  Description of Artificial Sequence: Synthetic oligonucleotide
gtccctcacagcttgtaaag

SEQ ID NO: 5253 - DNA, 20 bp, Artificial Sequence
  Description of Artificial Sequence: Synthetic oligonucleotide
tttcaggaaaggtattcctg

SEQ ID NO: 5254 - DNA, 22 bp, Artificial Sequence
  Description of Artificial Sequence: Synthetic oligonucleotide
tttgaattatttccctgacttc

SEQ ID NO: 5255 - DNA, 23 bp, Artificial Sequence
  Description of Artificial Sequence: Synthetic oligonucleotide
agaacaggattgtggactaattt

SEQ ID NO: 5256 - DNA, 21 bp, Artificial Sequence
  Description of Artificial Sequence: Synthetic oligonucleotide
cttcttcctgaaatacctggc

SEQ ID NO: 5257 - DNA, 21 bp, Artificial Sequence
  Description of Artificial Sequence: Synthetic oligonucleotide
gggactgtcttttctcgtttt

SEQ ID NO: 5258 - DNA, 24 bp, Artificial Sequence
  Description of Artificial Sequence: Synthetic oligonucleotide
ctaaaaccttcttgagagacagac

SEQ ID NO: 5259 - DNA, 20 bp, Artificial Sequence
  Description of Artificial Sequence: Synthetic oligonucleotide
aaaagatgcactgatcctcc

SEQ ID NO: 5260 - DNA, 23 bp, Artificial Sequence
  Description of Artificial Sequence: Synthetic oligonucleotide
taccttctgtgtttctctttgat

SEQ ID NO: 5261 - DNA, 21 bp, Artificial Sequence
  Description of Artificial Sequence: Synthetic oligonucleotide
gtcatgtctcttctcaggcaa

SEQ ID NO: 5262 - DNA, 22 bp, Artificial Sequence
  Description of Artificial Sequence: Synthetic oligonucleotide
ttctctgctcaaatgtccctta

SEQ ID NO: 5263 - DNA, 26 bp, Artificial Sequence
  Description of Artificial Sequence: Synthetic oligonucleotide
tagtaatttcagctgtcacataataa

SEQ ID NO: 5264 - DNA, 21 bp, Artificial Sequence
  Description of Artificial Sequence: Synthetic oligonucleotide
ctcaggctgtctctctcagtg

SEQ ID NO: 5265 - DNA, 21 bp, Artificial Sequence
  Description of Artificial Sequence: Synthetic oligonucleotide
taccatcaggaaggttcaaac

SEQ ID NO: 5266 - DNA, 20 bp, Artificial Sequence
  Description of Artificial Sequence: Synthetic oligonucleotide
attctggttacctgctgctc

SEQ ID NO: 5267 - DNA, 22 bp, Artificial Sequence
  Description of Artificial Sequence: Synthetic oligonucleotide
ttcccagacacttgaaataaaa

SEQ ID NO: 5268 - DNA, 20 bp, Artificial Sequence
  Description of Artificial Sequence: Synthetic oligonucleotide
gcgttttttctctgctcttc

SEQ ID NO: 5269 - DNA, 20 bp, Artificial Sequence
  Description of Artificial Sequence: Synthetic oligonucleotide
ttctgagaacttgaccatgg

SEQ ID NO: 5270 - DNA, 20 bp, Artificial Sequence
  Description of Artificial Sequence: Synthetic oligonucleotide
ggtgagggacaaaatctcag

SEQ ID NO: 5271 - DNA, 24 bp, Artificial Sequence
  Description of Artificial Sequence: Synthetic oligonucleotide
ttccccaatatgtaaaataatttc

SEQ ID NO: 5272 - DNA, 23 bp, Artificial Sequence
  Description of Artificial Sequence: Synthetic oligonucleotide
tctttacattttagcatctgacc

SEQ ID NO: 5273 - DNA, 25 bp, Artificial Sequence
  Description of Artificial Sequence: Synthetic oligonucleotide
tttctattatctgtattgcctctaa

SEQ ID NO: 5274 - DNA, 24 bp, Artificial Sequence
  Description of Artificial Sequence: Synthetic oligonucleotide
gtatatccaactacctacctgttg

SEQ ID NO: 5275 - DNA, 21 bp, Artificial Sequence
  Description of Artificial Sequence: Synthetic oligonucleotide
cagttcttctgtgagatccag

SEQ ID NO: 5276 - DNA, 21 bp, Artificial Sequence
  Description of Artificial Sequence: Synthetic oligonucleotide
tgttcagacagaaggcaccta

SEQ ID NO: 5277 - DNA, 25 bp, Artificial Sequence
  Description of Artificial Sequence: Synthetic oligonucleotide
tttgaataatcatttcatcattaca

SEQ ID NO: 5278 - DNA, 26 bp, Artificial Sequence
  Description of Artificial Sequence: Synthetic oligonucleotide
ggtattttcagttctattaacacttc

SEQ ID NO: 5279 - DNA, 21 bp, Artificial Sequence
  Description of Artificial Sequence: Synthetic oligonucleotide
gccaaggaattagacaccaac

SEQ ID NO: 5280 - DNA, 20 bp, Artificial Sequence
  Description of Artificial Sequence: Synthetic oligonucleotide
acctgcaatcctagcattgt

SEQ ID NO: 5281 - DNA, 20 bp, Artificial Sequence
  Description of Artificial Sequence: Synthetic oligonucleotide
gtcttgtgttccctggtacc

SEQ ID NO: 5282 - DNA, 21 bp, Artificial Sequence
  Description of Artificial Sequence: Synthetic oligonucleotide
gagacagtagaagagcatggg

SEQ ID NO: 5283 - DNA, 20 bp, Artificial Sequence
  Description of Artificial Sequence: Synthetic oligonucleotide
agatccttcggtgagagatg

SEQ ID NO: 5284 - DNA, 23 bp, Artificial Sequence
  Description of Artificial Sequence: Synthetic oligonucleotide
agcatcactgtctccaaaagtta

SEQ ID NO: 5285 - DNA, 22 bp, Artificial Sequence
  Description of Artificial Sequence: Synthetic oligonucleotide
aatcaggtgtttttttttaagc

SEQ ID NO: 5286 - DNA, 23 bp, Artificial Sequence
  Description of Artificial Sequence: Synthetic oligonucleotide
ccttctacccttcaatgtaaaga

SEQ ID NO: 5287 - DNA, 24 bp, Artificial Sequence
  Description of Artificial Sequence: Synthetic oligonucleotide
ttctctgattagaattcttcttcc

SEQ ID NO: 5288 - DNA, 25 bp, Artificial Sequence
  Description of Artificial Sequence: Synthetic oligonucleotide
ggtacttatctaattgactaaaccc

SEQ ID NO: 5289 - DNA, 20 bp, Artificial Sequence
  Description of Artificial Sequence: Synthetic oligonucleotide
gaacggttgccatagactct

SEQ ID NO: 5290 - DNA, 21 bp, Artificial Sequence
  Description of Artificial Sequence: Synthetic oligonucleotide
aacatgcaaattctggaaggt

SEQ ID NO: 5291 - DNA, 20 bp, Artificial Sequence
  Description of Artificial Sequence: Synthetic oligonucleotide
tctgcagtcacacatttctg

SEQ ID NO: 5292 - DNA, 20 bp, Artificial Sequence
  Description of Artificial Sequence: Synthetic oligonucleotide
ctcagatcagcaggagaggt

SEQ ID NO: 5293 - DNA, 23 bp, Artificial Sequence
  Description of Artificial Sequence: Synthetic oligonucleotide
tttgtgtgactgccttaaaacta

SEQ ID NO: 5294 - DNA, 20 bp, Artificial Sequence
  Description of Artificial Sequence: Synthetic oligonucleotide
aaaactcaggcactttgcat

SEQ ID NO: 5295 - DNA, 23 bp, Artificial Sequence
  Description of Artificial Sequence: Synthetic oligonucleotide
aagtattgcagtaagcatcactt

SEQ ID NO: 5296 - DNA, 21 bp, Artificial Sequence
  Description of Artificial Sequence: Synthetic oligonucleotide
gacagcagcaaccttactcct

SEQ ID NO: 5297 - DNA, 20 bp, Artificial Sequence
  Description of Artificial Sequence: Synthetic oligonucleotide
acagagaaggggacaagatg

SEQ ID NO: 5298 - DNA, 22 bp, Artificial Sequence
  Description of Artificial Sequence: Synthetic oligonucleotide
attgctctgttcttacctggag

SEQ ID NO: 5299 - DNA, 25 bp, Artificial Sequence
  Description of Artificial Sequence: Synthetic oligonucleotide
acacactcaattctaagtaaaaacc

SEQ ID NO: 5300 - DNA, 21 bp, Artificial Sequence
  Description of Artificial Sequence: Synthetic oligonucleotide
cctcttctggctcaaaaagag

SEQ ID NO: 5301 - DNA, 26 bp, Artificial Sequence
  Description of Artificial Sequence: Synthetic oligonucleotide
agaaataactgtctagaactcaatct

SEQ ID NO: 5302 - DNA, 21 bp, Artificial Sequence
  Description of Artificial Sequence: Synthetic oligonucleotide
gggctcagatgttcaggtact

SEQ ID NO: 5303 - DNA, 21 bp, Artificial Sequence
  Description of Artificial Sequence: Synthetic oligonucleotide
gctctgcactctctggaataa

SEQ ID NO: 5304 - DNA, 22 bp, Artificial Sequence
  Description of Artificial Sequence: Synthetic oligonucleotide
tggctggtctgtaaatagcata

SEQ ID NO: 5305 - DNA, 21 bp, Artificial Sequence
  Description of Artificial Sequence: Synthetic oligonucleotide
agtccacaccaggaagttctt

SEQ ID NO: 5306 - DNA, 21 bp, Artificial Sequence
  Description of Artificial Sequence: Synthetic oligonucleotide
aagtctcagaaacccaaggac

SEQ ID NO: 5307 - DNA, 20 bp, Artificial Sequence
  Description of Artificial Sequence: Synthetic oligonucleotide
gtcaggagagctgagaccac

SEQ ID NO: 5308 - DNA, 21 bp, Artificial Sequence
  Description of Artificial Sequence: Synthetic oligonucleotide
acatgaaggagtctgggagag

SEQ ID NO: 5309 - DNA, 22 bp, Artificial Sequence
  Description of Artificial Sequence: Synthetic oligonucleotide
taattgtaaaggggaacacaga

SEQ ID NO: 5310 - DNA, 20 bp, Artificial Sequence
  Description of Artificial Sequence: Synthetic oligonucleotide
ggtgctagatgtacaatgcc

SEQ ID NO: 5311 - DNA, 21 bp, Artificial Sequence
  Description of Artificial Sequence: Synthetic oligonucleotide
aggttccaaaaacaagaatgg

SEQ ID NO: 5312 - DNA, 20 bp, Artificial Sequence
  Description of Artificial Sequence: Synthetic oligonucleotide
cttctggaaaaccaaaacca

SEQ ID NO: 5313 - DNA, 25 bp, Artificial Sequence
  Description of Artificial Sequence: Synthetic oligonucleotide
tatattatctccactttacagatgc

SEQ ID NO: 5314 - DNA, 20 bp, Artificial Sequence
  Description of Artificial Sequence: Synthetic oligonucleotide
gagaaatagcctgcacaagg

SEQ ID NO: 5315 - DNA, 23 bp, Artificial Sequence
  Description of Artificial Sequence: Synthetic oligonucleotide
ctttagtgctttttcccataatt

SEQ ID NO: 5316 - DNA, 20 bp, Artificial Sequence
  Description of Artificial Sequence: Synthetic oligonucleotide
acactccaggctctcagtgt

SEQ ID NO: 5317 - DNA, 21 bp, Artificial Sequence
  Description of Artificial Sequence: Synthetic oligonucleotide
tgtggctagaggaggaattgt

SEQ ID NO: 5318 - DNA, 20 bp, Artificial Sequence
  Description of Artificial Sequence: Synthetic oligonucleotide
tttagtacccgacgctgtct

SEQ ID NO: 5319 - DNA, 22 bp, Artificial Sequence
  Description of Artificial Sequence: Synthetic oligonucleotide
acaggactcacaaagcttctaa

SEQ ID NO: 5320 - DNA, 20 bp, Artificial Sequence
  Description of Artificial Sequence: Synthetic oligonucleotide
cagagctttccattcctttg

SEQ ID NO: 5321 - DNA, 26 bp, Artificial Sequence
  Description of Artificial Sequence: Synthetic oligonucleotide
tactcctattatcccattttatagac

SEQ ID NO: 5322 - DNA, 20 bp, Artificial Sequence
  Description of Artificial Sequence: Synthetic oligonucleotide
agaccacaggcaatctaagg

SEQ ID NO: 5323 - DNA, 20 bp, Artificial Sequence
  Description of Artificial Sequence: Synthetic oligonucleotide
tgagggaatccattcttttg

SEQ ID NO: 5324 - DNA, 22 bp, Artificial Sequence
  Description of Artificial Sequence: Synthetic oligonucleotide
tacccccaggacatcattaaat

SEQ ID NO: 5325 - DNA, 20 bp, Artificial Sequence
  Description of Artificial Sequence: Synthetic oligonucleotide
gcagtgtgttattgctctcc

SEQ ID NO: 5326 - DNA, 25 bp, Artificial Sequence
  Description of Artificial Sequence: Synthetic oligonucleotide
gaagcttctgactctaaaatgtaaa

SEQ ID NO: 5327 - DNA, 20 bp, Artificial Sequence
  Description of Artificial Sequence: Synthetic oligonucleotide
tcagtagctacagtggctcc

SEQ ID NO: 5328 - DNA, 20 bp, Artificial Sequence
  Description of Artificial Sequence: Synthetic oligonucleotide
gtcccttaatgtggacatgg

SEQ ID NO: 5329 - DNA, 21 bp, Artificial Sequence
  Description of Artificial Sequence: Synthetic oligonucleotide
taaagatttccaggaaggagg

SEQ ID NO: 5330 - DNA, 20 bp, Artificial Sequence
  Description of Artificial Sequence: Synthetic oligonucleotide
aggaaccaacactgagagag

SEQ ID NO: 5331 - DNA, 20 bp, Artificial Sequence
  Description of Artificial Sequence: Synthetic oligonucleotide
gatgggggtgttactcaatg

SEQ ID NO: 5332 - DNA, 20 bp, Artificial Sequence
  Description of Artificial Sequence: Synthetic oligonucleotide
atggcgactgtctcaagact

SEQ ID NO: 5333 - DNA, 21 bp, Artificial Sequence
  Description of Artificial Sequence: Synthetic oligonucleotide
ctccaggtgaagagcacatag

SEQ ID NO: 5334 - DNA, 22 bp, Artificial Sequence
  Description of Artificial Sequence: Synthetic oligonucleotide
tttgcatctctattattgaaaa

SEQ ID NO: 5335 - DNA, 22 bp, Artificial Sequence
  Description of Artificial Sequence: Synthetic oligonucleotide
aaaaaagagggaatgaagagtc

SEQ ID NO: 5336 - DNA, 26 bp, Artificial Sequence
  Description of Artificial Sequence: Synthetic oligonucleotide
agagtcaacaaattactgaatttatt

SEQ ID NO: 5337 - DNA, 20 bp, Artificial Sequence
  Description of Artificial Sequence: Synthetic oligonucleotide
ctacaaaaaggccttgtttt

SEQ ID NO: 5338 - DNA, 23 bp, Artificial Sequence
  Description of Artificial Sequence: Synthetic oligonucleotide
ttttgtgtgtgtaattttgtttg

SEQ ID NO: 5339 - DNA, 24 bp, Artificial Sequence
  Description of Artificial Sequence: Synthetic oligonucleotide
gagaaggaaaaaagaaatctgtaa

SEQ ID NO: 5340 - DNA, 20 bp, Artificial Sequence
  Description of Artificial Sequence: Synthetic oligonucleotide
gacatcactgtcgaggtgtg

SEQ ID NO: 5341 - DNA, 23 bp, Artificial Sequence
  Description of Artificial Sequence: Synthetic oligonucleotide
aaatatgtgttggtgatgtgttc

SEQ ID NO: 5342 - DNA, 21 bp, Artificial Sequence
  Description of Artificial Sequence: Synthetic oligonucleotide
cccaattcctcattagctgag

SEQ ID NO: 5343 - DNA, 25 bp, Artificial Sequence
  Description of Artificial Sequence: Synthetic oligonucleotide
ctctatcttcaaaactaaatgtgac

SEQ ID NO: 5344 - DNA, 27 bp, Artificial Sequence
  Description of Artificial Sequence: Synthetic oligonucleotide
ctctgtaacatgaaataaataagaacc

SEQ ID NO: 5345 - DNA, 20 bp, Artificial Sequence
  Description of Artificial Sequence: Synthetic oligonucleotide
atcaataacccatttcctcc

SEQ ID NO: 5346 - DNA, 22 bp, Artificial Sequence
  Description of Artificial Sequence: Synthetic oligonucleotide
tgaggtttttttgtcattgttc

SEQ ID NO: 5347 - DNA, 21 bp, Artificial Sequence
  Description of Artificial Sequence: Synthetic oligonucleotide
tttacaagccgtgagagacac

SEQ ID NO: 5348 - DNA, 23 bp, Artificial Sequence
  Description of Artificial Sequence: Synthetic oligonucleotide
aaaacaatacgttttgaccaatt

SEQ ID NO: 5349 - DNA, 27 bp, Artificial Sequence
  Description of Artificial Sequence: Synthetic oligonucleotide
gacaaatcttgaatattctaaaatagg

SEQ ID NO: 5350 - DNA, 21 bp, Artificial Sequence
  Description of Artificial Sequence: Synthetic oligonucleotide
gtttagggaagcatgagaaac

SEQ ID NO: 5351 - DNA, 20 bp, Artificial Sequence
  Description of Artificial Sequence: Synthetic oligonucleotide
agatctaatctgccccaacc

SEQ ID NO: 5352 - DNA, 20 bp, Artificial Sequence
  Description of Artificial Sequence: Synthetic oligonucleotide
ttctcttctaccttccagct

SEQ ID NO: 5353 - DNA, 22 bp, Artificial Sequence
  Description of Artificial Sequence: Synthetic oligonucleotide
gttgatgggagtgtaaactgtt

SEQ ID NO: 5354 - DNA, 23 bp, Artificial Sequence
  Description of Artificial Sequence: Synthetic oligonucleotide
agatttgctatttccactctaca

SEQ ID NO: 5355 - DNA, 20 bp, Artificial Sequence
  Description of Artificial Sequence: Synthetic oligonucleotide
ttcaagtcacaaagggaagg

SEQ ID NO: 5356 - DNA, 20 bp, Artificial Sequence
  Description of Artificial Sequence: Synthetic oligonucleotide
acatagggaacagcacacac

SEQ ID NO: 5357 - DNA, 22 bp, Artificial Sequence
  Description of Artificial Sequence: Synthetic oligonucleotide
cactgctgtaaagaaatacctg

SEQ ID NO: 5358 - DNA, 21 bp, Artificial Sequence
  Description of Artificial Sequence: Synthetic oligonucleotide
aatatgggggcttatctccac

SEQ ID NO: 5359 - DNA, 20 bp, Artificial Sequence
  Description of Artificial Sequence: Synthetic oligonucleotide
gagctggcttttaattgagc

SEQ ID NO: 5360 - DNA, 21 bp, Artificial Sequence
  Description of Artificial Sequence: Synthetic oligonucleotide
tctcccttgctctctatccag

SEQ ID NO: 5361 - DNA, 23 bp, Artificial Sequence
  Description of Artificial Sequence: Synthetic oligonucleotide
tgttatgatctaggcttactgca

SEQ ID NO: 5362 - DNA, 25 bp, Artificial Sequence
  Description of Artificial Sequence: Synthetic oligonucleotide
gagttatatcattgctcagtagaga

SEQ ID NO: 5363 - DNA, 20 bp, Artificial Sequence
  Description of Artificial Sequence: Synthetic oligonucleotide
cagggcagaaggtttgagta

SEQ ID NO: 5364 - DNA, 20 bp, Artificial Sequence
  Description of Artificial Sequence: Synthetic oligonucleotide
accattgctcaagtctccag

SEQ ID NO: 5365 - DNA, 25 bp, Artificial Sequence
  Description of Artificial Sequence: Synthetic oligonucleotide
tagggtagactatgttcatttatca

SEQ ID NO: 5366 - DNA, 20 bp, Artificial Sequence
  Description of Artificial Sequence: Synthetic oligonucleotide
cctcgttatgcctcatgttc

SEQ ID NO: 5367 - DNA, 24 bp, Artificial Sequence
  Description of Artificial Sequence: Synthetic oligonucleotide
actgtactttctcttcaagcactt

SEQ ID NO: 5368 - DNA, 21 bp, Artificial Sequence
  Description of Artificial Sequence: Synthetic oligonucleotide
ggattcgaaaaccctctctct

SEQ ID NO: 5369 - DNA, 22 bp, Artificial Sequence
  Description of Artificial Sequence: Synthetic oligonucleotide
gtcttttactttgtgtgtgtgt

SEQ ID NO: 5370 - DNA, 25 bp, Artificial Sequence
  Description of Artificial Sequence: Synthetic oligonucleotide
aatatgagttatcacaaaaacattt

SEQ ID NO: 5371 - DNA, 20 bp, Artificial Sequence
  Description of Artificial Sequence: Synthetic oligonucleotide
cctttctctgttacctgtgg

SEQ ID NO: 5372 - DNA, 22 bp, Artificial Sequence
  Description of Artificial Sequence: Synthetic oligonucleotide
cacagagacctctagaggcgta

SEQ ID NO: 5373 - DNA, 23 bp, Artificial Sequence
  Description of Artificial Sequence: Synthetic oligonucleotide
tcctgataagaaagatggtagaa

SEQ ID NO: 5374 - DNA, 20 bp, Artificial Sequence
  Description of Artificial Sequence: Synthetic oligonucleotide
ctgagcaatcaattctggct

SEQ ID NO: 5375 - DNA, 20 bp, Artificial Sequence
  Description of Artificial Sequence: Synthetic oligonucleotide
aatctcaatatccaggcctg

SEQ ID NO: 5376 - DNA, 20 bp, Artificial Sequence
  Description of Artificial Sequence: Synthetic oligonucleotide
aagagccccaattttacctt

SEQ ID NO: 5377 - DNA, 20 bp, Artificial Sequence
  Description of Artificial Sequence: Synthetic oligonucleotide
gctaagcaggttgaagtcgt

SEQ ID NO: 5378 - DNA, 20 bp, Artificial Sequence
  Description of Artificial Sequence: Synthetic oligonucleotide
gttggcctcatgaagacatc

SEQ ID NO: 5379 - DNA, 20 bp, Artificial Sequence
  Description of Artificial Sequence: Synthetic oligonucleotide
tgaatgtgaacataggagcc

SEQ ID NO: 5380 - DNA, 25 bp, Artificial Sequence
  Description of Artificial Sequence: Synthetic oligonucleotide
tctcacattaaagctatttttcttg

SEQ ID NO: 5381 - DNA, 23 bp, Artificial Sequence
  Description of Artificial Sequence: Synthetic oligonucleotide
gttcaggctttatcctttagaga

SEQ ID NO: 5382 - DNA, 26 bp, Artificial Sequence
  Description of Artificial Sequence: Synthetic oligonucleotide
aggaacttaatctctacattttacca

SEQ ID NO: 5383 - DNA, 24 bp, Artificial Sequence
  Description of Artificial Sequence: Synthetic oligonucleotide
attaaagcagaagtttcttcagtg

SEQ ID NO: 5384 - DNA, 20 bp, Artificial Sequence
  Description of Artificial Sequence: Synthetic oligonucleotide
gactagaaggctaaagcggc

SEQ ID NO: 5385 - DNA, 20 bp, Artificial Sequence
  Description of Artificial Sequence: Synthetic oligonucleotide
gaggtgaggcaactctagca

SEQ ID NO: 5386 - DNA, 23 bp, Artificial Sequence
  Description of Artificial Sequence: Synthetic oligonucleotide
gtgtggccagatacatctataac

SEQ ID NO: 5387 - DNA, 20 bp, Artificial Sequence
  Description of Artificial Sequence: Synthetic oligonucleotide
gagattcccttcccattgtt

SEQ ID NO: 5388 - DNA, 24 bp, Artificial Sequence
  Description of Artificial Sequence: Synthetic oligonucleotide
aaacctccattactaacttgttgt

SEQ ID NO: 5389 - DNA, 20 bp, Artificial Sequence
  Description of Artificial Sequence: Synthetic oligonucleotide
ctgctatcacacaatgaggg

SEQ ID NO: 5390 - DNA, 20 bp, Artificial Sequence
  Description of Artificial Sequence: Synthetic oligonucleotide
gaagagtgatgaccaatccc

SEQ ID NO: 5391 - DNA, 25 bp, Artificial Sequence
  Description of Artificial Sequence: Synthetic oligonucleotide
tcaaatgatttaatacataaagtgc

SEQ ID NO: 5392 - DNA, 24 bp, Artificial Sequence
  Description of Artificial Sequence: Synthetic oligonucleotide
tactgtggattcattgtagctact

SEQ ID NO: 5393 - DNA, 20 bp, Artificial Sequence
  Description of Artificial Sequence: Synthetic oligonucleotide
tggttatgaagggtgtggtc

SEQ ID NO: 5394 - DNA, 25 bp, Artificial Sequence
  Description of Artificial Sequence: Synthetic oligonucleotide
taagaaaacatgatttttatttttc

SEQ ID NO: 5395 - DNA, 21 bp, Artificial Sequence
  Description of Artificial Sequence: Synthetic oligonucleotide
ccaattctgctagagttgcct

SEQ ID NO: 5396 - DNA, 20 bp, Artificial Sequence
  Description of Artificial Sequence: Synthetic oligonucleotide
gtgagagtgtgagcaacatg

SEQ ID NO: 5397 - DNA, 20 bp, Artificial Sequence
  Description of Artificial Sequence: Synthetic oligonucleotide
aacagagaaaccctcgaagg

SEQ ID NO: 5398 - DNA, 27 bp, Artificial Sequence
  Description of Artificial Sequence: Synthetic oligonucleotide
atagtgactgatgtttcaaatatattc

SEQ ID NO: 5399 - DNA, 24 bp, Artificial Sequence
  Description of Artificial Sequence: Synthetic oligonucleotide
atttaccttttctgagaaaaatgc

SEQ ID NO: 5400 - DNA, 19 bp, Artificial Sequence
  Description of Artificial Sequence: Synthetic oligonucleotide
tgatgagcaattttccatg

SEQ ID NO: 5401 - DNA, 23 bp, Artificial Sequence
  Description of Artificial Sequence: Synthetic oligonucleotide
ctccagaatttcccctattaata

SEQ ID NO: 5402 - DNA, 21 bp, Artificial Sequence
  Description of Artificial Sequence: Synthetic oligonucleotide
tgcctgggtatttaacatgag

SEQ ID NO: 5403 - DNA, 19 bp, Artificial Sequence
  Description of Artificial Sequence: Synthetic oligonucleotide
tgctgacacttccttcatg

SEQ ID NO: 5404 - DNA, 21 bp, Artificial Sequence
  Description of Artificial Sequence: Synthetic oligonucleotide
gggatctctcctacctgactg

SEQ ID NO: 5405 - DNA, 27 bp, Artificial Sequence
  Description of Artificial Sequence: Synthetic oligonucleotide
taataaaaatagatacaatgttatggc

SEQ ID NO: 5406 - DNA, 20 bp, Artificial Sequence
  Description of Artificial Sequence: Synthetic oligonucleotide
agttcattgcccggtagatt

SEQ ID NO: 5407 - DNA, 20 bp, Artificial Sequence
  Description of Artificial Sequence: Synthetic oligonucleotide
caccccatctccaactatga

SEQ ID NO: 5408 - DNA, 24 bp, Artificial Sequence
  Description of Artificial Sequence: Synthetic oligonucleotide
gttatttaaagccttgagtctgaa

SEQ ID NO: 5409 - DNA, 20 bp, Artificial Sequence
  Description of Artificial Sequence: Synthetic oligonucleotide
tccctggagtcacagaaaga

SEQ ID NO: 5410 - DNA, 21 bp, Artificial Sequence
  Description of Artificial Sequence: Synthetic oligonucleotide
ttttgcaagtctgtccttacc

SEQ ID NO: 5411 - DNA, 26 bp, Artificial Sequence
  Description of Artificial Sequence: Synthetic oligonucleotide
ttgtttagagtgaatatttttacaaa

SEQ ID NO: 5412 - DNA, 20 bp, Artificial Sequence
  Description of Artificial Sequence: Synthetic oligonucleotide
ggtgttaggttttctgttcc

SEQ ID NO: 5413 - DNA, 19 bp, Artificial Sequence
  Description of Artificial Sequence: Synthetic oligonucleotide
ctggtgacatccctctttc

SEQ ID NO: 5414 - DNA, 19 bp, Artificial Sequence
  Description of Artificial Sequence: Synthetic oligonucleotide
ctggtgacatccctctttc

SEQ ID NO: 5415 - DNA, 20 bp, Artificial Sequence
  Description of Artificial Sequence: Synthetic oligonucleotide
gctgtcatccctgttttcat

SEQ ID NO: 5416 - DNA, 23 bp, Artificial Sequence
  Description of Artificial Sequence: Synthetic oligonucleotide
ttctaagtgcttctcatgtgttc

SEQ ID NO: 5417 - DNA, 20 bp, Artificial Sequence
  Description of Artificial Sequence: Synthetic oligonucleotide
cagtgtccctgtctgaggac

SEQ ID NO: 5418 - DNA, 19 bp, Artificial Sequence
  Description of Artificial Sequence: Synthetic oligonucleotide
cacttgagaaggggttcag

SEQ ID NO: 5419 - DNA, 20 bp, Artificial Sequence
  Description of Artificial Sequence: Synthetic oligonucleotide
tgtcttccttggttctccag

SEQ ID NO: 5420 - DNA, 25 bp, Artificial Sequence
  Description of Artificial Sequence: Synthetic oligonucleotide
agctaagcttctatacaacttctga

SEQ ID NO: 5421 - DNA, 19 bp, Artificial Sequence
  Description of Artificial Sequence: Synthetic oligonucleotide
gtctggtggagtttgcagt

SEQ ID NO: 5422 - DNA, 19 bp, Artificial Sequence
  Description of Artificial Sequence: Synthetic oligonucleotide
ttggggcagtttagaagtg

SEQ ID NO: 5423 - DNA, 21 bp, Artificial Sequence
  Description of Artificial Sequence: Synthetic oligonucleotide
gcttatgtgctcagaaacggt

SEQ ID NO: 5424 - DNA, 19 bp, Artificial Sequence
  Description of Artificial Sequence: Synthetic oligonucleotide
ccaggtatggaatacaggg

SEQ ID NO: 5425 - DNA, 19 bp, Artificial Sequence
  Description of Artificial Sequence: Synthetic oligonucleotide
ggcttaggtgcaaaatttg

SEQ ID NO: 5426 - DNA, 27 bp, Artificial Sequence
  Description of Artificial Sequence: Synthetic oligonucleotide
ttagtaggtaacacttaagaagaaaaa

SEQ ID NO: 5427 - DNA, 20 bp, Artificial Sequence
  Description of Artificial Sequence: Synthetic oligonucleotide
ggatggactcatctcagcag

SEQ ID NO: 5428 - DNA, 19 bp, Artificial Sequence
  Description of Artificial Sequence: Synthetic oligonucleotide
acctctgaaatcaaccagg

SEQ ID NO: 5429 - DNA, 20 bp, Artificial Sequence
  Description of Artificial Sequence: Synthetic oligonucleotide
tcacactcatccacatcttc

SEQ ID NO: 5430 - DNA, 21 bp, Artificial Sequence
  Description of Artificial Sequence: Synthetic oligonucleotide
tgttcctggttaaaaaaaaaa

SEQ ID NO: 5431 - DNA, 19 bp, Artificial Sequence
  Description of Artificial Sequence: Synthetic oligonucleotide
caatacactccctcaaccg

SEQ ID NO: 5432 - DNA, 19 bp, Artificial Sequence
  Description of Artificial Sequence: Synthetic oligonucleotide
atcccatcttcctttctcc

SEQ ID NO: 5433 - DNA, 21 bp, Artificial Sequence
  Description of Artificial Sequence: Synthetic oligonucleotide
gtagctgaacaaggctcagaa

SEQ ID NO: 5434 - DNA, 24 bp, Artificial Sequence
  Description of Artificial Sequence: Synthetic oligonucleotide
agtctctcactaggcttatgatct

SEQ ID NO: 5435 - DNA, 25 bp, Artificial Sequence
  Description of Artificial Sequence: Synthetic oligonucleotide
aaagtcaataatattcttctgaccg

SEQ ID NO: 5436 - DNA, 23 bp, Artificial Sequence
  Description of Artificial Sequence: Synthetic oligonucleotide
aagggtttttccctttataaaac

SEQ ID NO: 5437 - DNA, 20 bp, Artificial Sequence
  Description of Artificial Sequence: Synthetic oligonucleotide
cccaggtttgaagacagaga

SEQ ID NO: 5438 - DNA, 25 bp, Artificial Sequence
  Description of Artificial Sequence: Synthetic oligonucleotide
tgttcttcatagactacaaaattcc

SEQ ID NO: 5439 - DNA, 26 bp, Artificial Sequence
  Description of Artificial Sequence: Synthetic oligonucleotide
ctttttttaatctgtaattctctcaa

SEQ ID NO: 5440 - DNA, 20 bp, Artificial Sequence
  Description of Artificial Sequence: Synthetic oligonucleotide
tttatatcccactgcgcagt

SEQ ID NO: 5441 - DNA, 26 bp, Artificial Sequence
  Description of Artificial Sequence: Synthetic oligonucleotide
tgagttatttaacactagaaaaaaaa

SEQ ID NO: 5442 - DNA, 19 bp, Artificial Sequence
  Description of Artificial Sequence: Synthetic oligonucleotide
tctggtcctgatctgagtg

SEQ ID NO: 5443 - DNA, 19 bp, Artificial Sequence
  Description of Artificial Sequence: Synthetic oligonucleotide
gtcccatttagggtgagac

SEQ ID NO: 5444 - DNA, 24 bp, Artificial Sequence
  Description of Artificial Sequence: Synthetic oligonucleotide
tatttactacacagcaaagaggat

SEQ ID NO: 5445 - DNA, 19 bp, Artificial Sequence
  Description of Artificial Sequence: Synthetic oligonucleotide
cggtgttctctctctgtgg

SEQ ID NO: 5446 - DNA, 19 bp, Artificial Sequence
  Description of Artificial Sequence: Synthetic oligonucleotide
tcttcgtgctgactccaat

SEQ ID NO: 5447 - DNA, 20 bp, Artificial Sequence
  Description of Artificial Sequence: Synthetic oligonucleotide
gcatctactactgctgggag

SEQ ID NO: 5448 - DNA, 19 bp, Artificial Sequence
  Description of Artificial Sequence: Synthetic oligonucleotide
gatggatctgtgcagtcag

SEQ ID NO: 5449 - DNA, 19 bp, Artificial Sequence
  Description of Artificial Sequence: Synthetic oligonucleotide
catctcctcacaaaggcag

SEQ ID NO: 5450 - DNA, 19 bp, Artificial Sequence
  Description of Artificial Sequence: Synthetic oligonucleotide
ctgaaaaccctccagtcag

SEQ ID NO: 5451 - DNA, 23 bp, Artificial Sequence
  Description of Artificial Sequence: Synthetic oligonucleotide
cagttatactgaagatgccttcc

SEQ ID NO: 5452 - DNA, 23 bp, Artificial Sequence
  Description of Artificial Sequence: Synthetic oligonucleotide
tagtataaagaccagggagaagg

SEQ ID NO: 5453 - DNA, 25 bp, Artificial Sequence
  Description of Artificial Sequence: Synthetic oligonucleotide
ggatatttattctctttgtctcaca

SEQ ID NO: 5454 - DNA, 26 bp, Artificial Sequence
  Description of Artificial Sequence: Synthetic oligonucleotide
ctaagaaatttttagcaataagattt

SEQ ID NO: 5455 - DNA, 23 bp, Artificial Sequence
  Description of Artificial Sequence: Synthetic oligonucleotide
attttctcagcaaggaattttta

SEQ ID NO: 5456 - DNA, 25 bp, Artificial Sequence
  Description of Artificial Sequence: Synthetic oligonucleotide
tttatttctttgtatagatccaggt

SEQ ID NO: 5457 - DNA, 24 bp, Artificial Sequence
  Description of Artificial Sequence: Synthetic oligonucleotide
gattggcttttacatattaacttt

SEQ ID NO: 5458 - DNA, 25 bp, Artificial Sequence
  Description of Artificial Sequence: Synthetic oligonucleotide
atattcttaacagaaaacaatcatg

SEQ ID NO: 5459 - DNA, 23 bp, Artificial Sequence
  Description of Artificial Sequence: Synthetic oligonucleotide
gctttacaggtttgtgttttaca

SEQ ID NO: 5460 - DNA, 26 bp, Artificial Sequence
  Description of Artificial Sequence: Synthetic oligonucleotide
attgtttatatgtgtagctttctctc

SEQ ID NO: 5461 - DNA, 22 bp, Artificial Sequence
  Description of Artificial Sequence: Synthetic oligonucleotide
tttcaataatagagatgcaaag

SEQ ID NO: 5462 - DNA, 20 bp, Artificial Sequence
  Description of Artificial Sequence: Synthetic oligonucleotide
ctgcacaggtggtttcagtt

SEQ ID NO: 5463 - DNA, 20 bp, Artificial Sequence
  Description of Artificial Sequence: Synthetic oligonucleotide
gctggaaggtagaagagaaa

SEQ ID NO: 5464 - DNA, 24 bp, Artificial Sequence
  Description of Artificial Sequence: Synthetic oligonucleotide
gaaactgaacgtttttattttatt

SEQ ID NO: 5465 - DNA, 26 bp, Artificial Sequence
  Description of Artificial Sequence: Synthetic oligonucleotide
cttttttattttacctttttttagtc

SEQ ID NO: 5466 - DNA, 24 bp, Artificial Sequence
  Description of Artificial Sequence: Synthetic oligonucleotide
acccagagtcaaaaactgttatat

SEQ ID NO: 5467 - DNA, 27 bp, Artificial Sequence
  Description of Artificial Sequence: Synthetic oligonucleotide
aaaaaaagatgtagatacttaattttg

SEQ ID NO: 5468 - DNA, 19 bp, Artificial Sequence
  Description of Artificial Sequence: Synthetic oligonucleotide
tttgtggagttttctgctg

SEQ ID NO: 5469 - DNA, 20 bp, Artificial Sequence
  Description of Artificial Sequence: Synthetic oligonucleotide
aaccccactgccttgtagac

SEQ ID NO: 5470 - DNA, 19 bp, Artificial Sequence
  Description of Artificial Sequence: Synthetic oligonucleotide
taaaatcttggaggcggtt

SEQ ID NO: 5471 - DNA, 19 bp, Artificial Sequence
  Description of Artificial Sequence: Synthetic oligonucleotide
ctcccatagtgactgcctg

SEQ ID NO: 5472 - DNA, 25 bp, Artificial Sequence
  Description of Artificial Sequence: Synthetic oligonucleotide
atgatgtattagtccatttcatgtt

SEQ ID NO: 5473 - DNA, 20 bp, Artificial Sequence
  Description of Artificial Sequence: Synthetic oligonucleotide
ctgctgatgttgcagatcct

SEQ ID NO: 5474 - DNA, 19 bp, Artificial Sequence
  Description of Artificial Sequence: Synthetic oligonucleotide
actgtgggcacaatttctg

SEQ ID NO: 5475 - DNA, 20 bp, Artificial Sequence
  Description of Artificial Sequence: Synthetic oligonucleotide
aaaagatcacaaggcagagg

SEQ ID NO: 5476 - DNA, 19 bp, Artificial Sequence
  Description of Artificial Sequence: Synthetic oligonucleotide
aaacttcacctctcctggc

SEQ ID NO: 5477 - DNA, 25 bp, Artificial Sequence
  Description of Artificial Sequence: Synthetic oligonucleotide
atattgaaaatttgaagtctagtga

SEQ ID NO: 5478 - DNA, 25 bp, Artificial Sequence
  Description of Artificial Sequence: Synthetic oligonucleotide
aaatgagaatatattaactagggga

SEQ ID NO: 5479 - DNA, 21 bp, Artificial Sequence
  Description of Artificial Sequence: Synthetic oligonucleotide
ggtaggtgagtgtatgcatgt

SEQ ID NO: 5480 - DNA, 21 bp, Artificial Sequence
  Description of Artificial Sequence: Synthetic oligonucleotide
ttcctctcctctctctttctc

SEQ ID NO: 5481 - DNA, 20 bp, Artificial Sequence
  Description of Artificial Sequence: Synthetic oligonucleotide
gcacaagctgtgaggagaac

SEQ ID NO: 5482 - DNA, 19 bp, Artificial Sequence
  Description of Artificial Sequence: Synthetic oligonucleotide
tcttggaaggttttcccac

SEQ ID NO: 5483 - DNA, 20 bp, Artificial Sequence
  Description of Artificial Sequence: Synthetic oligonucleotide
tggaccttaggtctgaatgc

SEQ ID NO: 5484 - DNA, 25 bp, Artificial Sequence
  Description of Artificial Sequence: Synthetic oligonucleotide
aaaatgtttacttgacacataagaa

SEQ ID NO: 5485 - DNA, 27 bp, Artificial Sequence
  Description of Artificial Sequence: Synthetic oligonucleotide
gttaaacaattttgttagagtaaaatg

SEQ ID NO: 5486 - DNA, 23 bp, Artificial Sequence
  Description of Artificial Sequence: Synthetic oligonucleotide
gtcctacacacaaatcagtcagt

SEQ ID NO: 5487 - DNA, 20 bp, Artificial Sequence
  Description of Artificial Sequence: Synthetic oligonucleotide
cgtccattccttctccaact

SEQ ID NO: 5488 - DNA, 20 bp, Artificial Sequence
  Description of Artificial Sequence: Synthetic oligonucleotide
ggtggctgacacagttgtct

SEQ ID NO: 5489 - DNA, 24 bp, Artificial Sequence
  Description of Artificial Sequence: Synthetic oligonucleotide
aataaataatcatgggctgtttac

SEQ ID NO: 5490 - DNA, 21 bp, Artificial Sequence
  Description of Artificial Sequence: Synthetic oligonucleotide
aagcacttatgggtgtagatg

SEQ ID NO: 5491 - DNA, 23 bp, Artificial Sequence
  Description of Artificial Sequence: Synthetic oligonucleotide
gggatggaaattatttaccatag

SEQ ID NO: 5492 - DNA, 23 bp, Artificial Sequence
  Description of Artificial Sequence: Synthetic oligonucleotide
caacctgcttactttttctcttt

SEQ ID NO: 5493 - DNA, 23 bp, Artificial Sequence
  Description of Artificial Sequence: Synthetic oligonucleotide
tgtgatagaagcctctacacaat

SEQ ID NO: 5494 - DNA, 22 bp, Artificial Sequence
  Description of Artificial Sequence: Synthetic oligonucleotide
gtaggaatttctgtacaggaag

SEQ ID NO: 5495 - DNA, 20 bp, Artificial Sequence
  Description of Artificial Sequence: Synthetic oligonucleotide
taggctcatgtgctctggag

SEQ ID NO: 5496 - DNA, 23 bp, Artificial Sequence
  Description of Artificial Sequence: Synthetic oligonucleotide
ttaatttcaaaaaaattttggaa

SEQ ID NO: 5497 - DNA, 23 bp, Artificial Sequence
  Description of Artificial Sequence: Synthetic oligonucleotide
accaagggaagacagagttataa

SEQ ID NO: 5498 - DNA, 23 bp, Artificial Sequence
  Description of Artificial Sequence: Synthetic oligonucleotide
aggaataccatcagaacagaact

SEQ ID NO: 5499 - DNA, 23 bp, Artificial Sequence
  Description of Artificial Sequence: Synthetic oligonucleotide
taatccctaaatttcacaatgtg

SEQ ID NO: 5500 - DNA, 19 bp, Artificial Sequence
  Description of Artificial Sequence: Synthetic oligonucleotide
cctaccaggctgacacact

SEQ ID NO: 5501 - DNA, 24 bp, Artificial Sequence
  Description of Artificial Sequence: Synthetic oligonucleotide
tctccaaaaaatatcctttctaga

SEQ ID NO: 5502 - DNA, 23 bp, Artificial Sequence
  Description of Artificial Sequence: Synthetic oligonucleotide
cgcctctctttactgaaactaat

SEQ ID NO: 5503 - DNA, 19 bp, Artificial Sequence
  Description of Artificial Sequence: Synthetic oligonucleotide
tggggaaagatgctagatg

SEQ ID NO: 5504 - DNA, 23 bp, Artificial Sequence
  Description of Artificial Sequence: Synthetic oligonucleotide
aaaagatggcagtattagcaatc

SEQ ID NO: 5505 - DNA, 23 bp, Artificial Sequence
  Description of Artificial Sequence: Synthetic oligonucleotide
cctctcactctgtgtgtatttct

SEQ ID NO: 5506 - DNA, 19 bp, Artificial Sequence
  Description of Artificial Sequence: Synthetic oligonucleotide
ggtttgggaagaggaagag

SEQ ID NO: 5507 - DNA, 23 bp, Artificial Sequence
  Description of Artificial Sequence: Synthetic oligonucleotide
actaaaacattctttgtgtccac

SEQ ID NO: 5508 - DNA, 19 bp, Artificial Sequence
  Description of Artificial Sequence: Synthetic oligonucleotide
acctctgcccaactcagac

SEQ ID NO: 5509 - DNA, 19 bp, Artificial Sequence
  Description of Artificial Sequence: Synthetic oligonucleotide
ggtctgagaaggtgccaat

SEQ ID NO: 5510 - DNA, 23 bp, Artificial Sequence
  Description of Artificial Sequence: Synthetic oligonucleotide
aaggaaagataaggaaagatgtg

SEQ ID NO: 5511 - DNA, 19 bp, Artificial Sequence
  Description of Artificial Sequence: Synthetic oligonucleotide
ataaagggaagggtccctg

SEQ ID NO: 5512 - DNA, 23 bp, Artificial Sequence
  Description of Artificial Sequence: Synthetic oligonucleotide
tgagggtcttcagaataaagtaa

SEQ ID NO: 5513 - DNA, 19 bp, Artificial Sequence
  Description of Artificial Sequence: Synthetic oligonucleotide
gtccaatcctgacatccct

SEQ ID NO: 5514 - DNA, 23 bp, Artificial Sequence
  Description of Artificial Sequence: Synthetic oligonucleotide
tctcagtaaggatgaaatgtgtt

SEQ ID NO: 5515 - DNA, 22 bp, Artificial Sequence
  Description of Artificial Sequence: Synthetic oligonucleotide
gtgaagtctctcagcatttgtt

SEQ ID NO: 5516 - DNA, 20 bp, Artificial Sequence
  Description of Artificial Sequence: Synthetic oligonucleotide
agctgtgctatggggtttct

SEQ ID NO: 5517 - DNA, 23 bp, Artificial Sequence
  Description of Artificial Sequence: Synthetic oligonucleotide
aatgggagatatttactaggcaa

SEQ ID NO: 5518 - DNA, 23 bp, Artificial Sequence
  Description of Artificial Sequence: Synthetic oligonucleotide
atcaacaacaaagtcctttctct

SEQ ID NO: 5519 - DNA, 19 bp, Artificial Sequence
  Description of Artificial Sequence: Synthetic oligonucleotide
gctttggatatggagtggg

SEQ ID NO: 5520 - DNA, 23 bp, Artificial Sequence
  Description of Artificial Sequence: Synthetic oligonucleotide
gtaccttaacacaagggaagaga

SEQ ID NO: 5521 - DNA, 23 bp, Artificial Sequence
  Description of Artificial Sequence: Synthetic oligonucleotide
gcagtgtcactgaagaataagaa

SEQ ID NO: 5522 - DNA, 19 bp, Artificial Sequence
  Description of Artificial Sequence: Synthetic oligonucleotide
tgtatccctgcctttagcc

SEQ ID NO: 5523 - DNA, 19 bp, Artificial Sequence
  Description of Artificial Sequence: Synthetic oligonucleotide
ctcctccaaggctctcttg

SEQ ID NO: 5524 - DNA, 19 bp, Artificial Sequence
  Description of Artificial Sequence: Synthetic oligonucleotide
aagcaagacaacaggggtc

SEQ ID NO: 5525 - DNA, 22 bp, Artificial Sequence
  Description of Artificial Sequence: Synthetic oligonucleotide
ggagtctgaacagcagataatt

SEQ ID NO: 5526 - DNA, 23 bp, Artificial Sequence
  Description of Artificial Sequence: Synthetic oligonucleotide
ggaacccaggtaactactagatt

SEQ ID NO: 5527 - DNA, 23 bp, Artificial Sequence
  Description of Artificial Sequence: Synthetic oligonucleotide
tgaaaaatacatttctgctgttt

SEQ ID NO: 5528 - DNA, 23 bp, Artificial Sequence
  Description of Artificial Sequence: Synthetic oligonucleotide
tagtgatcaaggggttactgtaa

SEQ ID NO: 5529 - DNA, 23 bp, Artificial Sequence
  Description of Artificial Sequence: Synthetic oligonucleotide
gcctgaggctatgttaataaaga

SEQ ID NO: 5530 - DNA, 23 bp, Artificial Sequence
  Description of Artificial Sequence: Synthetic oligonucleotide
attttgtattcaatacctgctcc

SEQ ID NO: 5531 - DNA, 22 bp, Artificial Sequence
  Description of Artificial Sequence: Synthetic oligonucleotide
gtgaggattgtgtagcatcttc

SEQ ID NO: 5532 - DNA, 22 bp, Artificial Sequence
  Description of Artificial Sequence: Synthetic oligonucleotide
gaagttcctctgttttgtgtgt

SEQ ID NO: 5533 - DNA, 23 bp, Artificial Sequence
  Description of Artificial Sequence: Synthetic oligonucleotide
agagaacagtttcttttccctaa

SEQ ID NO: 5534 - DNA, 23 bp, Artificial Sequence
  Description of Artificial Sequence: Synthetic oligonucleotide
gagagagtgagttgtttctgttg

SEQ ID NO: 5535 - DNA, 20 bp, Artificial Sequence
  Description of Artificial Sequence: Synthetic oligonucleotide
aaccgtcatagcagtggaaa

SEQ ID NO: 5536 - DNA, 22 bp, Artificial Sequence
  Description of Artificial Sequence: Synthetic oligonucleotide
ctgtctctcccaaatgattatg

SEQ ID NO: 5537 - DNA, 24 bp, Artificial Sequence
  Description of Artificial Sequence: Synthetic oligonucleotide
tagtttgactacattcattccaaa

SEQ ID NO: 5538 - DNA, 19 bp, Artificial Sequence
  Description of Artificial Sequence: Synthetic oligonucleotide
cagcagccttgtcacctac

SEQ ID NO: 5539 - DNA, 26 bp, Artificial Sequence
  Description of Artificial Sequence: Synthetic oligonucleotide
tcattaatctttgtaactcttttttt

SEQ ID NO: 5540 - DNA, 24 bp, Artificial Sequence
  Description of Artificial Sequence: Synthetic oligonucleotide
actcagtattatgagatttgggag

SEQ ID NO: 5541 - DNA, 22 bp, Artificial Sequence
  Description of Artificial Sequence: Synthetic oligonucleotide
ctgagttcctgcagtacttgtt

SEQ ID NO: 5542 - DNA, 23 bp, Artificial Sequence
  Description of Artificial Sequence: Synthetic oligonucleotide
cttcagaactgttgttagctgag

SEQ ID NO: 5543 - DNA, 23 bp, Artificial Sequence
  Description of Artificial Sequence: Synthetic oligonucleotide
cacctggcatgaattaattataa

SEQ ID NO: 5544 - DNA, 24 bp, Artificial Sequence
  Description of Artificial Sequence: Synthetic oligonucleotide
tgatgaagcaataaaatcattagt

SEQ ID NO: 5545 - DNA, 24 bp, Artificial Sequence
  Description of Artificial Sequence: Synthetic oligonucleotide
agtcttcttcattgtcacagtatc

SEQ ID NO: 5546 - DNA, 22 bp, Artificial Sequence
  Description of Artificial Sequence: Synthetic oligonucleotide
gaaaatctccaggtcctattct

SEQ ID NO: 5547 - DNA, 23 bp, Artificial Sequence
  Description of Artificial Sequence: Synthetic oligonucleotide
tgctagagatgagactttgctat

SEQ ID NO: 5548 - DNA, 25 bp, Artificial Sequence
  Description of Artificial Sequence: Synthetic oligonucleotide
tagtaaacagagctatttgttcctg

SEQ ID NO: 5549 - DNA, 19 bp, Artificial Sequence
  Description of Artificial Sequence: Synthetic oligonucleotide
ggagactgaggaatggaca

SEQ ID NO: 5550 - DNA, 19 bp, Artificial Sequence
  Description of Artificial Sequence: Synthetic oligonucleotide
caactccattccaggtgtg

SEQ ID NO: 5551 - DNA, 20 bp, Artificial Sequence
  Description of Artificial Sequence: Synthetic oligonucleotide
ccctggtcttatcaccacct

SEQ ID NO: 5552 - DNA, 19 bp, Artificial Sequence
  Description of Artificial Sequence: Synthetic oligonucleotide
tagcccctttaatctcccc

SEQ ID NO: 5553 - DNA, 22 bp, Artificial Sequence
  Description of Artificial Sequence: Synthetic oligonucleotide
tgcagatgacacagatgaatag

SEQ ID NO: 5554 - DNA, 23 bp, Artificial Sequence
  Description of Artificial Sequence: Synthetic oligonucleotide
gccatgtaaagctttaaaattct

SEQ ID NO: 5555 - DNA, 23 bp, Artificial Sequence
  Description of Artificial Sequence: Synthetic oligonucleotide
gtgagaacagtgaagagaaacag

SEQ ID NO: 5556 - DNA, 22 bp, Artificial Sequence
  Description of Artificial Sequence: Synthetic oligonucleotide
acctgcactgtctcctatagag

SEQ ID NO: 5557 - DNA, 21 bp, Artificial Sequence
  Description of Artificial Sequence: Synthetic oligonucleotide
ctgagataaggcagaaaggtg

SEQ ID NO: 5558 - DNA, 20 bp, Artificial Sequence
  Description of Artificial Sequence: Synthetic oligonucleotide
gctgatgggattcttaatgg

SEQ ID NO: 5559 - DNA, 19 bp, Artificial Sequence
  Description of Artificial Sequence: Synthetic oligonucleotide
gctgcagaaggagagaagg

SEQ ID NO: 5560 - DNA, 22 bp, Artificial Sequence
  Description of Artificial Sequence: Synthetic oligonucleotide
ccttagttgtccttgtgtacct

SEQ ID NO: 5561 - DNA, 19 bp, Artificial Sequence
  Description of Artificial Sequence: Synthetic oligonucleotide
gcttcaagctgtaggggat

SEQ ID NO: 5562 - DNA, 23 bp, Artificial Sequence
  Description of Artificial Sequence: Synthetic oligonucleotide
gataatctcctattccttggaaa

SEQ ID NO: 5563 - DNA, 22 bp, Artificial Sequence
  Description of Artificial Sequence: Synthetic oligonucleotide
ctcaggtccctttatagaggaa

SEQ ID NO: 5564 - DNA, 22 bp, Artificial Sequence
  Description of Artificial Sequence: Synthetic oligonucleotide
aggtattgtgaatgggctcata

SEQ ID NO: 5565 - DNA, 23 bp, Artificial Sequence
  Description of Artificial Sequence: Synthetic oligonucleotide
gacagaaagaaggctagagagac

SEQ ID NO: 5566 - DNA, 24 bp, Artificial Sequence
  Description of Artificial Sequence: Synthetic oligonucleotide
gcagataatgtactgaaattctga

SEQ ID NO: 5567 - DNA, 24 bp, Artificial Sequence
  Description of Artificial Sequence: Synthetic oligonucleotide
aataggatctacttttctggaatc

SEQ ID NO: 5568 - DNA, 25 bp, Artificial Sequence
  Description of Artificial Sequence: Synthetic oligonucleotide
gttgtttatgttaacatgtaatggg

SEQ ID NO: 5569 - DNA, 22 bp, Artificial Sequence
  Description of Artificial Sequence: Synthetic oligonucleotide
ctccctctatacatgatctccc

SEQ ID NO: 5570 - DNA, 23 bp, Artificial Sequence
  Description of Artificial Sequence: Synthetic oligonucleotide
aggcaaataaatcagtaaacctt

SEQ ID NO: 5571 - DNA, 26 bp, Artificial Sequence
  Description of Artificial Sequence: Synthetic oligonucleotide
ctctgaaatactgaagtatttattgg

SEQ ID NO: 5572 - DNA, 19 bp, Artificial Sequence
  Description of Artificial Sequence: Synthetic oligonucleotide
tggaaagcatcagagagga

SEQ ID NO: 5573 - DNA, 23 bp, Artificial Sequence
  Description of Artificial Sequence: Synthetic oligonucleotide
ttacattcccatattccaaatat

SEQ ID NO: 5574 - DNA, 23 bp, Artificial Sequence
  Description of Artificial Sequence: Synthetic oligonucleotide
gtcacagaagtcactgagatcag

SEQ ID NO: 5575 - DNA, 23 bp, Artificial Sequence
  Description of Artificial Sequence: Synthetic oligonucleotide
ttgtttttattttcagcaaacac

SEQ ID NO: 5576 - DNA, 19 bp, Artificial Sequence
  Description of Artificial Sequence: Synthetic oligonucleotide
tgttggtcccattttcctc

SEQ ID NO: 5577 - DNA, 22 bp, Artificial Sequence
  Description of Artificial Sequence: Synthetic oligonucleotide
cactaagatggggtaaggagac

SEQ ID NO: 5578 - DNA, 24 bp, Artificial Sequence
  Description of Artificial Sequence: Synthetic oligonucleotide
gtcttttcatctgttaatatggtg

SEQ ID NO: 5579 - DNA, 23 bp, Artificial Sequence
  Description of Artificial Sequence: Synthetic oligonucleotide
cactccttatttgtgacactagc

SEQ ID NO: 5580 - DNA, 19 bp, Artificial Sequence
  Description of Artificial Sequence: Synthetic oligonucleotide
tgttgttgtcctcttccag

SEQ ID NO: 5581 - DNA, 22 bp, Artificial Sequence
  Description of Artificial Sequence: Synthetic oligonucleotide
cacagtaaaaggaaaccagttt

SEQ ID NO: 5582 - DNA, 19 bp, Artificial Sequence
  Description of Artificial Sequence: Synthetic oligonucleotide
acccttgggaggaagagac

SEQ ID NO: 5583 - DNA, 19 bp, Artificial Sequence
  Description of Artificial Sequence: Synthetic oligonucleotide
ggatgggaaaggaagaatc

SEQ ID NO: 5584 - DNA, 19 bp, Artificial Sequence
  Description of Artificial Sequence: Synthetic oligonucleotide
tacataggggactggaggg

SEQ ID NO: 5585 - DNA, 19 bp, Artificial Sequence
  Description of Artificial Sequence: Synthetic oligonucleotide
gctcagattccagctcctc

SEQ ID NO: 5586 - DNA, 22 bp, Artificial Sequence
  Description of Artificial Sequence: Synthetic oligonucleotide
aattctctgtctcttcagggtc

SEQ ID NO: 5587 - DNA, 22 bp, Artificial Sequence
  Description of Artificial Sequence: Synthetic oligonucleotide
gtgagatgaagaagtgtcacag

SEQ ID NO: 5588 - DNA, 22 bp, Artificial Sequence
  Description of Artificial Sequence: Synthetic oligonucleotide
ggtgaaggatactgggttttta

SEQ ID NO: 5589 - DNA, 22 bp, Artificial Sequence
  Description of Artificial Sequence: Synthetic oligonucleotide
aggaacagagacacacagagag

SEQ ID NO: 5590 - DNA, 23 bp, Artificial Sequence
  Description of Artificial Sequence: Synthetic oligonucleotide
gttctacttcatgttccaacaag

SEQ ID NO: 5591 - DNA, 25 bp, Artificial Sequence
  Description of Artificial Sequence: Synthetic oligonucleotide
aaaacacattgatgtagatatgtcc

SEQ ID NO: 5592 - DNA, 21 bp, Artificial Sequence
  Description of Artificial Sequence: Synthetic oligonucleotide
caactcagaggacatccccta

SEQ ID NO: 5593 - DNA, 22 bp, Artificial Sequence
  Description of Artificial Sequence: Synthetic oligonucleotide
attagctttaggtctccaccac

SEQ ID NO: 5594 - DNA, 22 bp, Artificial Sequence
  Description of Artificial Sequence: Synthetic oligonucleotide
ctttttttagctcagagggaag

SEQ ID NO: 5595 - DNA, 22 bp, Artificial Sequence
  Description of Artificial Sequence: Synthetic oligonucleotide
gaaatgttagcttctgagggat

SEQ ID NO: 5596 - DNA, 25 bp, Artificial Sequence
  Description of Artificial Sequence: Synthetic oligonucleotide
tatgatttcattgttttcacttagt

SEQ ID NO: 5597 - DNA, 21 bp, Artificial Sequence
  Description of Artificial Sequence: Synthetic oligonucleotide
ctgtccccaaaacaaaaataa

SEQ ID NO: 5598 - DNA, 21 bp, Artificial Sequence
  Description of Artificial Sequence: Synthetic oligonucleotide
cccattctattttctgatgca

SEQ ID NO: 5599 - DNA, 23 bp, Artificial Sequence
  Description of Artificial Sequence: Synthetic oligonucleotide
cataggaagggaagagtaaagag

SEQ ID NO: 5600 - DNA, 19 bp, Artificial Sequence
  Description of Artificial Sequence: Synthetic oligonucleotide
gggaacacactgaccacct

SEQ ID NO: 5601 - DNA, 19 bp, Artificial Sequence
  Description of Artificial Sequence: Synthetic oligonucleotide
gctgttcccacctcttgac

SEQ ID NO: 5602 - DNA, 23 bp, Artificial Sequence
  Description of Artificial Sequence: Synthetic oligonucleotide
agccaagtaaatgaccaataaat

SEQ ID NO: 5603 - DNA, 22 bp, Artificial Sequence
  Description of Artificial Sequence: Synthetic oligonucleotide
actcagcctgtcccagttatag

SEQ ID NO: 5604 - DNA, 21 bp, Artificial Sequence
  Description of Artificial Sequence: Synthetic oligonucleotide
tttgaaccatgctcccagata

SEQ ID NO: 5605 - DNA, 21 bp, Artificial Sequence
  Description of Artificial Sequence: Synthetic oligonucleotide
cttgaattaagctccttggag

SEQ ID NO: 5606 - DNA, 20 bp, Artificial Sequence
  Description of Artificial Sequence: Synthetic oligonucleotide
agcaggcatcacagaagagt

SEQ ID NO: 5607 - DNA, 23 bp, Artificial Sequence
  Description of Artificial Sequence: Synthetic oligonucleotide
tgggtaatttattttgttgtttt

SEQ ID NO: 5608 - DNA, 23 bp, Artificial Sequence
  Description of Artificial Sequence: Synthetic oligonucleotide
attaccccattctactctgtctt

SEQ ID NO: 5609 - DNA, 23 bp, Artificial Sequence
  Description of Artificial Sequence: Synthetic oligonucleotide
ctacaggcatgtaatgagttcac

SEQ ID NO: 5610 - DNA, 22 bp, Artificial Sequence
  Description of Artificial Sequence: Synthetic oligonucleotide
gaaacagggacatacacaagat

SEQ ID NO: 5611 - DNA, 23 bp, Artificial Sequence
  Description of Artificial Sequence: Synthetic oligonucleotide
tactaggagagaaggaagggata

SEQ ID NO: 5612 - DNA, 19 bp, Artificial Sequence
  Description of Artificial Sequence: Synthetic oligonucleotide
tgcctgatgccctttatct

SEQ ID NO: 5613 - DNA, 22 bp, Artificial Sequence
  Description of Artificial Sequence: Synthetic oligonucleotide
ctctaggtcaggaaggattgtt

SEQ ID NO: 5614 - DNA, 23 bp, Artificial Sequence
  Description of Artificial Sequence: Synthetic oligonucleotide
taaaatccaagagttctcagaaa

SEQ ID NO: 5615 - DNA, 23 bp, Artificial Sequence
  Description of Artificial Sequence: Synthetic oligonucleotide
atccctttctggtcaatgtaata

SEQ ID NO: 5616 - DNA, 21 bp, Artificial Sequence
  Description of Artificial Sequence: Synthetic oligonucleotide
cataatctacctgccttttgg

SEQ ID NO: 5617 - DNA, 19 bp, Artificial Sequence
  Description of Artificial Sequence: Synthetic oligonucleotide
tgagaggaatggagggaag

SEQ ID NO: 5618 - DNA, 21 bp, Artificial Sequence
  Description of Artificial Sequence: Synthetic oligonucleotide
ggttgggattttaaaaattca

SEQ ID NO: 5619 - DNA, 23 bp, Artificial Sequence
  Description of Artificial Sequence: Synthetic oligonucleotide
caaaatgagtaagacaacaaagg

SEQ ID NO: 5620 - DNA, 19 bp, Artificial Sequence
  Description of Artificial Sequence: Synthetic oligonucleotide
gccctcagcaagttctcac

SEQ ID NO: 5621 - DNA, 19 bp, Artificial Sequence
  Description of Artificial Sequence: Synthetic oligonucleotide
attgctgtggggactatgg

SEQ ID NO: 5622 - DNA, 22 bp, Artificial Sequence
  Description of Artificial Sequence: Synthetic oligonucleotide
atggggtctgtagacacaacta

SEQ ID NO: 5623 - DNA, 26 bp, Artificial Sequence
  Description of Artificial Sequence: Synthetic oligonucleotide
ttagtcacattaaaatgataaaagtg

SEQ ID NO: 5624 - DNA, 22 bp, Artificial Sequence
  Description of Artificial Sequence: Synthetic oligonucleotide
gtcctcatcataaagtctctgc

SEQ ID NO: 5625 - DNA, 19 bp, Artificial Sequence
  Description of Artificial Sequence: Synthetic oligonucleotide
cctgctgagttccactgac

SEQ ID NO: 5626 - DNA, 23 bp, Artificial Sequence
  Description of Artificial Sequence: Synthetic oligonucleotide
ctcgaatctgttttcttcttctt

SEQ ID NO: 5627 - DNA, 19 bp, Artificial Sequence
  Description of Artificial Sequence: Synthetic oligonucleotide
actggttcctcccaatgtg

SEQ ID NO: 5628 - DNA, 26 bp, Artificial Sequence
  Description of Artificial Sequence: Synthetic oligonucleotide
cccaattattagtaattaaagaaatg

SEQ ID NO: 5629 - DNA, 21 bp, Artificial Sequence
  Description of Artificial Sequence: Synthetic oligonucleotide
gaacagatggcttcaatgtag

SEQ ID NO: 5630 - DNA, 21 bp, Artificial Sequence
  Description of Artificial Sequence: Synthetic oligonucleotide
atccaatctgatgggagtatg

SEQ ID NO: 5631 - DNA, 24 bp, Artificial Sequence
  Description of Artificial Sequence: Synthetic oligonucleotide
tcctgacttgtgaaaattctataa

SEQ ID NO: 5632 - DNA, 22 bp, Artificial Sequence
  Description of Artificial Sequence: Synthetic oligonucleotide
gttctctacagtgacagccagt

SEQ ID NO: 5633 - DNA, 21 bp, Artificial Sequence
  Description of Artificial Sequence: Synthetic oligonucleotide
gaaccattgtgactggaaatt

SEQ ID NO: 5634 - DNA, 25 bp, Artificial Sequence
  Description of Artificial Sequence: Synthetic oligonucleotide
atatagtaaccccattttacagagg

SEQ ID NO: 5635 - DNA, 22 bp, Artificial Sequence
  Description of Artificial Sequence: Synthetic oligonucleotide
tgcacatctagggcactagtag

SEQ ID NO: 5636 - DNA, 21 bp, Artificial Sequence
  Description of Artificial Sequence: Synthetic oligonucleotide
ggtaatccggaaagagaaaag

SEQ ID NO: 5637 - DNA, 26 bp, Artificial Sequence
  Description of Artificial Sequence: Synthetic oligonucleotide
tttagtctaaagaattgagactaccg

SEQ ID NO: 5638 - DNA, 19 bp, Artificial Sequence
  Description of Artificial Sequence: Synthetic oligonucleotide
tacctctgcagagcaaagg

SEQ ID NO: 5639 - DNA, 23 bp, Artificial Sequence
  Description of Artificial Sequence: Synthetic oligonucleotide
agtgacactaaaacaagaggaca

SEQ ID NO: 5640 - DNA, 19 bp, Artificial Sequence
  Description of Artificial Sequence: Synthetic oligonucleotide
gtgtttcctccccagtcat

SEQ ID NO: 5641 - DNA, 21 bp, Artificial Sequence
  Description of Artificial Sequence: Synthetic oligonucleotide
gagagctggaactcttaccag

SEQ ID NO: 5642 - DNA, 25 bp, Artificial Sequence
  Description of Artificial Sequence: Synthetic oligonucleotide
cagtttacaagtatttttcaaagaa

SEQ ID NO: 5643 - DNA, 19 bp, Artificial Sequence
  Description of Artificial Sequence: Synthetic oligonucleotide
agcgagagaggattttccc

SEQ ID NO: 5644 - DNA, 22 bp, Artificial Sequence
  Description of Artificial Sequence: Synthetic oligonucleotide
gtctgaccactgagacacatag

SEQ ID NO: 5645 - DNA, 23 bp, Artificial Sequence
  Description of Artificial Sequence: Synthetic oligonucleotide
aactattctgctcaaaaaaaaaa

SEQ ID NO: 5646 - DNA, 23 bp, Artificial Sequence
  Description of Artificial Sequence: Synthetic oligonucleotide
tgttttttgagataaggtctcac

SEQ ID NO: 5647 - DNA, 21 bp, Artificial Sequence
  Description of Artificial Sequence: Synthetic oligonucleotide
cagctgacctgatgaatatca

SEQ ID NO: 5648 - DNA, 21 bp, Artificial Sequence
  Description of Artificial Sequence: Synthetic oligonucleotide
atgacagttgacgatctccat

SEQ ID NO: 5649 - DNA, 24 bp, Artificial Sequence
  Description of Artificial Sequence: Synthetic oligonucleotide
cacatactaattaccctgatttga

SEQ ID NO: 5650 - DNA, 19 bp, Artificial Sequence
  Description of Artificial Sequence: Synthetic oligonucleotide
ccccaggaactcagttgtt

SEQ ID NO: 5651 - DNA, 23 bp, Artificial Sequence
  Description of Artificial Sequence: Synthetic oligonucleotide
gctacagagtgagaatttgtctc

SEQ ID NO: 5652 - DNA, 21 bp, Artificial Sequence
  Description of Artificial Sequence: Synthetic oligonucleotide
acctcattggtaaacatccac

SEQ ID NO: 5653 - DNA, 26 bp, Artificial Sequence
  Description of Artificial Sequence: Synthetic oligonucleotide
cttctctatttttatatttcattgaa

SEQ ID NO: 5654 - DNA, 21 bp, Artificial Sequence
  Description of Artificial Sequence: Synthetic oligonucleotide
ggttctttcctctctgtcaac

SEQ ID NO: 5655 - DNA, 20 bp, Artificial Sequence
  Description of Artificial Sequence: Synthetic oligonucleotide
aactgtgagccacactgcac

SEQ ID NO: 5656 - DNA, 23 bp, Artificial Sequence
  Description of Artificial Sequence: Synthetic oligonucleotide
ctcttcgagtgaaagtatttgaa

SEQ ID NO: 5657 - DNA, 18 bp, Artificial Sequence
  Description of Artificial Sequence: Synthetic oligonucleotide
aattttccacggaattcg

SEQ ID NO: 5658 - DNA, 23 bp, Artificial Sequence
  Description of Artificial Sequence: Synthetic oligonucleotide
cagaatgctcatctgattaagac

SEQ ID NO: 5659 - DNA, 19 bp, Artificial Sequence
  Description of Artificial Sequence: Synthetic oligonucleotide
ctttggacagaagacctgg

SEQ ID NO: 5660 - DNA, 27 bp, Artificial Sequence
  Description of Artificial Sequence: Synthetic oligonucleotide
acagaaaagaatagaaatttacttaag

SEQ ID NO: 5661 - DNA, 22 bp, Artificial Sequence
  Description of Artificial Sequence: Synthetic oligonucleotide
gacggcctctattacctctact

SEQ ID NO: 5662 - DNA, 19 bp, Artificial Sequence
  Description of Artificial Sequence: Synthetic oligonucleotide
gatatgacccctcatcccc

SEQ ID NO: 5663 - DNA, 20 bp, Artificial Sequence
  Description of Artificial Sequence: Synthetic oligonucleotide
ccacccaacagtcctcttct

SEQ ID NO: 5664 - DNA, 21 bp, Artificial Sequence
  Description of Artificial Sequence: Synthetic oligonucleotide
acatctgcccataatgacaat

SEQ ID NO: 5665 - DNA, 19 bp, Artificial Sequence
  Description of Artificial Sequence: Synthetic oligonucleotide
tctcacctcccttctgtcc

SEQ ID NO: 5666 - DNA, 19 bp, Artificial Sequence
  Description of Artificial Sequence: Synthetic oligonucleotide
tctcacctcccttctgtcc

SEQ ID NO: 5667 - DNA, 21 bp, Artificial Sequence
  Description of Artificial Sequence: Synthetic oligonucleotide
acttgccaacttctctctctg

SEQ ID NO: 5668 - DNA, 18 bp, Artificial Sequence
  Description of Artificial Sequence: Synthetic oligonucleotide
atcgtcctgaacgaggac

SEQ ID NO: 5669 - DNA, 22 bp, Artificial Sequence
  Description of Artificial Sequence: Synthetic oligonucleotide
ctcctcctgaggttgatctaag

SEQ ID NO: 5670 - DNA, 21 bp, Artificial Sequence
  Description of Artificial Sequence: Synthetic oligonucleotide
gtaaaatcgtcagcctcttca

SEQ ID NO: 5671 - DNA, 20 bp, Artificial Sequence
  Description of Artificial Sequence: Synthetic oligonucleotide
tggcacctgattacgtcact

SEQ ID NO: 5672 - DNA, 23 bp, Artificial Sequence
  Description of Artificial Sequence: Synthetic oligonucleotide
gattctctcctccttctcctaac

SEQ ID NO: 5673 - DNA, 19 bp, Artificial Sequence
  Description of Artificial Sequence: Synthetic oligonucleotide
aagggcctaaagcagcact

SEQ ID NO: 5674 - DNA, 20 bp, Artificial Sequence
  Description of Artificial Sequence: Synthetic oligonucleotide
gtggaggacggaagtgaact

SEQ ID NO: 5675 - DNA, 25 bp, Artificial Sequence
  Description of Artificial Sequence: Synthetic oligonucleotide
tatctttgtttattaactgttctgg

SEQ ID NO: 5676 - DNA, 25 bp, Artificial Sequence
  Description of Artificial Sequence: Synthetic oligonucleotide
attttcttcatgtattagaagaatt

SEQ ID NO: 5677 - DNA, 25 bp, Artificial Sequence
  Description of Artificial Sequence: Synthetic oligonucleotide
gacaaaaatctttacattaaaagag

SEQ ID NO: 5678 - DNA, 24 bp, Artificial Sequence
  Description of Artificial Sequence: Synthetic oligonucleotide
acaaagaaaaaattgataaattgg

SEQ ID NO: 5679 - DNA, 18 bp, Artificial Sequence
  Description of Artificial Sequence: Synthetic oligonucleotide
cttttccaggagagctgg

SEQ ID NO: 5680 - DNA, 18 bp, Artificial Sequence
  Description of Artificial Sequence: Synthetic oligonucleotide
cttttccaggagagctgg

SEQ ID NO: 5681 - DNA, 19 bp, Artificial Sequence
  Description of Artificial Sequence: Synthetic oligonucleotide
gagttgaggggggctctag

SEQ ID NO: 5682 - DNA, 21 bp, Artificial Sequence
  Description of Artificial Sequence: Synthetic oligonucleotide
catcttaaggacaagggaatg

SEQ ID NO: 5683 - DNA, 18 bp, Artificial Sequence
  Description of Artificial Sequence: Synthetic oligonucleotide
acctgagaagatgccctg

SEQ ID NO: 5684 - DNA, 18 bp, Artificial Sequence
  Description of Artificial Sequence: Synthetic oligonucleotide
tttcagaagctgccagag

SEQ ID NO: 5685 - DNA, 19 bp, Artificial Sequence
  Description of Artificial Sequence: Synthetic oligonucleotide
ggggatggctagaaaacag

SEQ ID NO: 5686 - DNA, 25 bp, Artificial Sequence
  Description of Artificial Sequence: Synthetic oligonucleotide
tgcttgtagtcttacaaataatgtt

SEQ ID NO: 5687 - DNA, 26 bp, Artificial Sequence
  Description of Artificial Sequence: Synthetic oligonucleotide
catctattatcttttagtcaatgacc

SEQ ID NO: 5688 - DNA, 19 bp, Artificial Sequence
  Description of Artificial Sequence: Synthetic oligonucleotide
tctgtcctcagtccttggg

SEQ ID NO: 5689 - DNA, 27 bp, Artificial Sequence
  Description of Artificial Sequence: Synthetic oligonucleotide
aattcaccaatcttataattaaatatt

SEQ ID NO: 5690 - DNA, 18 bp, Artificial Sequence
  Description of Artificial Sequence: Synthetic oligonucleotide
gacatggggatgctgttt

SEQ ID NO: 5691 - DNA, 21 bp, Artificial Sequence
  Description of Artificial Sequence: Synthetic oligonucleotide
ctctgctgtgttttggaagtt

SEQ ID NO: 5692 - DNA, 24 bp, Artificial Sequence
  Description of Artificial Sequence: Synthetic oligonucleotide
cactggttattcctttctactctt

SEQ ID NO: 5693 - DNA, 22 bp, Artificial Sequence
  Description of Artificial Sequence: Synthetic oligonucleotide
agagttagggtcagggagagtt

SEQ ID NO: 5694 - DNA, 18 bp, Artificial Sequence
  Description of Artificial Sequence: Synthetic oligonucleotide
aacaccctcctctccttg

SEQ ID NO: 5695 - DNA, 24 bp, Artificial Sequence
  Description of Artificial Sequence: Synthetic oligonucleotide
agctggaagaatagagaattaaaa

SEQ ID NO: 5696 - DNA, 18 bp, Artificial Sequence
  Description of Artificial Sequence: Synthetic oligonucleotide
ctgccttctaaggggatg

SEQ ID NO: 5697 - DNA, 25 bp, Artificial Sequence
  Description of Artificial Sequence: Synthetic oligonucleotide
gtagcagtaataatatttgaggtga

SEQ ID NO: 5698 - DNA, 19 bp, Artificial Sequence
  Description of Artificial Sequence: Synthetic oligonucleotide
ggacaggatcaggaaacat

SEQ ID NO: 5699 - DNA, 21 bp, Artificial Sequence
  Description of Artificial Sequence: Synthetic oligonucleotide
gtctctgtgcattctgagaca

SEQ ID NO: 5700 - DNA, 23 bp, Artificial Sequence
  Description of Artificial Sequence: Synthetic oligonucleotide
gtacctcactgacttcctgtctt

SEQ ID NO: 5701 - DNA, 21 bp, Artificial Sequence
  Description of Artificial Sequence: Synthetic oligonucleotide
taaaatgggggtcagctaaat

SEQ ID NO: 5702 - DNA, 22 bp, Artificial Sequence
  Description of Artificial Sequence: Synthetic oligonucleotide
ccagctccctctatttatgttt

SEQ ID NO: 5703 - DNA, 23 bp, Artificial Sequence
  Description of Artificial Sequence: Synthetic oligonucleotide
cagggacctaggtatctagttcc

SEQ ID NO: 5704 - DNA, 23 bp, Artificial Sequence
  Description of Artificial Sequence: Synthetic oligonucleotide
aaaggggttacaaaaatatcaag

SEQ ID NO: 5705 - DNA, 18 bp, Artificial Sequence
  Description of Artificial Sequence: Synthetic oligonucleotide
ttctttggcgctctttct

SEQ ID NO: 5706 - DNA, 22 bp, Artificial Sequence
  Description of Artificial Sequence: Synthetic oligonucleotide
gttgggagtgatttagcactct

SEQ ID NO: 5707 - DNA, 22 bp, Artificial Sequence
  Description of Artificial Sequence: Synthetic oligonucleotide
gtagtagctgacactgtcccag

SEQ ID NO: 5708 - DNA, 20 bp, Artificial Sequence
  Description of Artificial Sequence: Synthetic oligonucleotide
gcctcctgctccattatttt

SEQ ID NO: 5709 - DNA, 18 bp, Artificial Sequence
  Description of Artificial Sequence: Synthetic oligonucleotide
atgccctcaaagtcagct

SEQ ID NO: 5710 - DNA, 23 bp, Artificial Sequence
  Description of Artificial Sequence: Synthetic oligonucleotide
ttagagagagctcacaaaatgtc

SEQ ID NO: 5711 - DNA, 26 bp, Artificial Sequence
  Description of Artificial Sequence: Synthetic oligonucleotide
atcaaatataatacatgaacaaagtg

SEQ ID NO: 5712 - DNA, 18 bp, Artificial Sequence
  Description of Artificial Sequence: Synthetic oligonucleotide
ctcagctgccacacagtc

SEQ ID NO: 5713 - DNA, 24 bp, Artificial Sequence
  Description of Artificial Sequence: Synthetic oligonucleotide
gctagtttttgtagctcatagtga

SEQ ID NO: 5714 - DNA, 19 bp, Artificial Sequence
  Description of Artificial Sequence: Synthetic oligonucleotide
ccccatttccactcttcag

SEQ ID NO: 5715 - DNA, 23 bp, Artificial Sequence
  Description of Artificial Sequence: Synthetic oligonucleotide
taaagagatttattctgagccaa

SEQ ID NO: 5716 - DNA, 18 bp, Artificial Sequence
  Description of Artificial Sequence: Synthetic oligonucleotide
tcagcccctgaatattgg

SEQ ID NO: 5717 - DNA, 23 bp, Artificial Sequence
  Description of Artificial Sequence: Synthetic oligonucleotide
atttttcaaaccaaccttctaac

SEQ ID NO: 5718 - DNA, 19 bp, Artificial Sequence
  Description of Artificial Sequence: Synthetic oligonucleotide
acagcagctaaagccagtg

SEQ ID NO: 5719 - DNA, 21 bp, Artificial Sequence
  Description of Artificial Sequence: Synthetic oligonucleotide
atccagtggaccttagagcat

SEQ ID NO: 5720 - DNA, 20 bp, Artificial Sequence
  Description of Artificial Sequence: Synthetic oligonucleotide
gtgcttcagagttgatgacc

SEQ ID NO: 5721 - DNA, 21 bp, Artificial Sequence
  Description of Artificial Sequence: Synthetic oligonucleotide
gaaatctgttcaccgagtgtt

SEQ ID NO: 5722 - DNA, 25 bp, Artificial Sequence
  Description of Artificial Sequence: Synthetic oligonucleotide
ctatacatttacttttagaaatgca

SEQ ID NO: 5723 - DNA, 25 bp, Artificial Sequence
  Description of Artificial Sequence: Synthetic oligonucleotide
gtctatgaaaatgaaataaacaaaa

SEQ ID NO: 5724 - DNA, 26 bp, Artificial Sequence
  Description of Artificial Sequence: Synthetic oligonucleotide
taaaaattgttatctgaattatttca

SEQ ID NO: 5725 - DNA, 20 bp, Artificial Sequence
  Description of Artificial Sequence: Synthetic oligonucleotide
ctacagggacaagcacaatc

SEQ ID NO: 5726 - DNA, 19 bp, Artificial Sequence
  Description of Artificial Sequence: Synthetic oligonucleotide
gccccagtaacctacaagg

SEQ ID NO: 5727 - DNA, 27 bp, Artificial Sequence
  Description of Artificial Sequence: Synthetic oligonucleotide
tactgctgttatactgttattcttatt

SEQ ID NO: 5728 - DNA, 19 bp, Artificial Sequence
  Description of Artificial Sequence: Synthetic oligonucleotide
tctgtctgcgggtagagct

SEQ ID NO: 5729 - DNA, 23 bp, Artificial Sequence
  Description of Artificial Sequence: Synthetic oligonucleotide
ttaataaataaacaaagcctcca

SEQ ID NO: 5730 - DNA, 25 bp, Artificial Sequence
  Description of Artificial Sequence: Synthetic oligonucleotide
gttagccatcttacttaattcttct

SEQ ID NO: 5731 - DNA, 23 bp, Artificial Sequence
  Description of Artificial Sequence: Synthetic oligonucleotide
aaggagagacagtctgctcttac

SEQ ID NO: 5732 - DNA, 22 bp, Artificial Sequence
  Description of Artificial Sequence: Synthetic oligonucleotide
aaccctttatttcctcgtttct

SEQ ID NO: 5733 - DNA, 23 bp, Artificial Sequence
  Description of Artificial Sequence: Synthetic oligonucleotide
gctccttcagtaaaaaagagaaa

SEQ ID NO: 5734 - DNA, 18 bp, Artificial Sequence
  Description of Artificial Sequence: Synthetic oligonucleotide
gcatgttgggaggtcaag

SEQ ID NO: 5735 - DNA, 20 bp, Artificial Sequence
  Description of Artificial Sequence: Synthetic oligonucleotide
ttaacgacgactcacacgat

SEQ ID NO: 5736 - DNA, 21 bp, Artificial Sequence
  Description of Artificial Sequence: Synthetic oligonucleotide
acaccaagggctcttatgaat

SEQ ID NO: 5737 - DNA, 19 bp, Artificial Sequence
  Description of Artificial Sequence: Synthetic oligonucleotide
tgtttcttagtgcccaggc

SEQ ID NO: 5738 - DNA, 26 bp, Artificial Sequence
  Description of Artificial Sequence: Synthetic oligonucleotide
ctatccctgtcattactaactattcc

SEQ ID NO: 5739 - DNA, 27 bp, Artificial Sequence
  Description of Artificial Sequence: Synthetic oligonucleotide
tctatcattcttatctgtatagtcagc

SEQ ID NO: 5740 - DNA, 24 bp, Artificial Sequence
  Description of Artificial Sequence: Synthetic oligonucleotide
ggtcaaaaagcttatttcttttaa

SEQ ID NO: 5741 - DNA, 19 bp, Artificial Sequence
  Description of Artificial Sequence: Synthetic oligonucleotide
gggcaactctcaagggttt

SEQ ID NO: 5742 - DNA, 19 bp, Artificial Sequence
  Description of Artificial Sequence: Synthetic oligonucleotide
gggtgaagctggcctattt

SEQ ID NO: 5743 - DNA, 21 bp, Artificial Sequence
  Description of Artificial Sequence: Synthetic oligonucleotide
aggacctggaaacaggtattg

SEQ ID NO: 5744 - DNA, 21 bp, Artificial Sequence
  Description of Artificial Sequence: Synthetic oligonucleotide
cctccaactttacccagtctt

SEQ ID NO: 5745 - DNA, 24 bp, Artificial Sequence
  Description of Artificial Sequence: Synthetic oligonucleotide
aaaagagttgttctatgaacagct

SEQ ID NO: 5746 - DNA, 23 bp, Artificial Sequence
  Description of Artificial Sequence: Synthetic oligonucleotide
tcttacatctctcgtgattatgg

SEQ ID NO: 5747 - DNA, 26 bp, Artificial Sequence
  Description of Artificial Sequence: Synthetic oligonucleotide
gagttgggtattactataaaaattct

SEQ ID NO: 5748 - DNA, 18 bp, Artificial Sequence
  Description of Artificial Sequence: Synthetic oligonucleotide
ggctctcaggatctcagg

SEQ ID NO: 5749 - DNA, 20 bp, Artificial Sequence
  Description of Artificial Sequence: Synthetic oligonucleotide
tactacaaccagagcgaggg

SEQ ID NO: 5750 - DNA, 21 bp, Artificial Sequence
  Description of Artificial Sequence: Synthetic oligonucleotide
atttgggcctgaactgaaaat

SEQ ID NO: 5751 - DNA, 24 bp, Artificial Sequence
  Description of Artificial Sequence: Synthetic oligonucleotide
tgtagtgtccagttctaagagatt

SEQ ID NO: 5752 - DNA, 21 bp, Artificial Sequence
  Description of Artificial Sequence: Synthetic oligonucleotide
ccagaacgcagagactttatg

SEQ ID NO: 5753 - DNA, 21 bp, Artificial Sequence
  Description of Artificial Sequence: Synthetic oligonucleotide
gattaccctccctaccacaac

SEQ ID NO: 5754 - DNA, 19 bp, Artificial Sequence
  Description of Artificial Sequence: Synthetic oligonucleotide
acaacatggactccgtgct

SEQ ID NO: 5755 - DNA, 18 bp, Artificial Sequence
  Description of Artificial Sequence: Synthetic oligonucleotide
cagaaggtgcatctggct

SEQ ID NO: 5756 - DNA, 21 bp, Artificial Sequence
  Description of Artificial Sequence: Synthetic oligonucleotide
caagtgtggaagaaaaagctg

SEQ ID NO: 5757 - DNA, 23 bp, Artificial Sequence
  Description of Artificial Sequence: Synthetic oligonucleotide
gaatctgttgctgtagaacacag

SEQ ID NO: 5758 - DNA, 21 bp, Artificial Sequence
  Description of Artificial Sequence: Synthetic oligonucleotide
ctgctgtagctctgtgggtaa

SEQ ID NO: 5759 - DNA, 20 bp, Artificial Sequence
  Description of Artificial Sequence: Synthetic oligonucleotide
ctccattaacacatgggttg

SEQ ID NO: 5760 - DNA, 20 bp, Artificial Sequence
  Description of Artificial Sequence: Synthetic oligonucleotide
agaatcttccttctgggatg

SEQ ID NO: 5761 - DNA, 19 bp, Artificial Sequence
  Description of Artificial Sequence: Synthetic oligonucleotide
aaggtctcctgctttccct

SEQ ID NO: 5762 - DNA, 18 bp, Artificial Sequence
  Description of Artificial Sequence: Synthetic oligonucleotide
cacctgctgtcactgtcg

SEQ ID NO: 5763 - DNA, 18 bp, Artificial Sequence
  Description of Artificial Sequence: Synthetic oligonucleotide
acaccccaagtcagatgc

SEQ ID NO: 5764 - DNA, 19 bp, Artificial Sequence
  Description of Artificial Sequence: Synthetic oligonucleotide
ggggatcacagaaggtgac

SEQ ID NO: 5765 - DNA, 21 bp, Artificial Sequence
  Description of Artificial Sequence: Synthetic oligonucleotide
ctgcttcataatacatggctg

SEQ ID NO: 5766 - DNA, 20 bp, Artificial Sequence
  Description of Artificial Sequence: Synthetic oligonucleotide
cctttcaggaaccctgtatg

SEQ ID NO: 5767 - DNA, 24 bp, Artificial Sequence
  Description of Artificial Sequence: Synthetic oligonucleotide
ttcttcagttgtttgtaaacattt

SEQ ID NO: 5768 - DNA, 26 bp, Artificial Sequence
  Description of Artificial Sequence: Synthetic oligonucleotide
gcaatttatacattatatagggaagc

SEQ ID NO: 5769 - DNA, 23 bp, Artificial Sequence
  Description of Artificial Sequence: Synthetic oligonucleotide
ttataaaacagcctatggacatg

SEQ ID NO: 5770 - DNA, 23 bp, Artificial Sequence
  Description of Artificial Sequence: Synthetic oligonucleotide
cagaggtatgagacatcgaggta

SEQ ID NO: 5771 - DNA, 23 bp, Artificial Sequence
  Description of Artificial Sequence: Synthetic oligonucleotide
cattgtgttttgtccactctatt

SEQ ID NO: 5772 - DNA, 21 bp, Artificial Sequence
  Description of Artificial Sequence: Synthetic oligonucleotide
aggagcaagggttgactgtag

SEQ ID NO: 5773 - DNA, 20 bp, Artificial Sequence
  Description of Artificial Sequence: Synthetic oligonucleotide
gaatagaggtcctgtccctc

SEQ ID NO: 5774 - DNA, 18 bp, Artificial Sequence
  Description of Artificial Sequence: Synthetic oligonucleotide
tggcaagatcctgattgc

SEQ ID NO: 5775 - DNA, 26 bp, Artificial Sequence
  Description of Artificial Sequence: Synthetic oligonucleotide
tagaaaatctagatttagtccacttc

SEQ ID NO: 5776 - DNA, 20 bp, Artificial Sequence
  Description of Artificial Sequence: Synthetic oligonucleotide
cttgaaagcctctggaatct

SEQ ID NO: 5777 - DNA, 26 bp, Artificial Sequence
  Description of Artificial Sequence: Synthetic oligonucleotide
caaaattcatattaatttaaactgaa

SEQ ID NO: 5778 - DNA, 21 bp, Artificial Sequence
  Description of Artificial Sequence: Synthetic oligonucleotide
ctccaggcacttctactttcc

SEQ ID NO: 5779 - DNA, 20 bp, Artificial Sequence
  Description of Artificial Sequence: Synthetic oligonucleotide
ctgtcacagagcaggaagag

SEQ ID NO: 5780 - DNA, 19 bp, Artificial Sequence
  Description of Artificial Sequence: Synthetic oligonucleotide
caaccagagccaaggtgat

SEQ ID NO: 5781 - DNA, 20 bp, Artificial Sequence
  Description of Artificial Sequence: Synthetic oligonucleotide
cgtctgccatgttgacaagt

SEQ ID NO: 5782 - DNA, 24 bp, Artificial Sequence
  Description of Artificial Sequence: Synthetic oligonucleotide
catattttttataaagcaaatggg

SEQ ID NO: 5783 - DNA, 24 bp, Artificial Sequence
  Description of Artificial Sequence: Synthetic oligonucleotide
tagtcatgtctagatttgaggaga

SEQ ID NO: 5784 - DNA, 21 bp, Artificial Sequence
  Description of Artificial Sequence: Synthetic oligonucleotide
attccaccagctgtgtagttt

SEQ ID NO: 5785 - DNA, 21 bp, Artificial Sequence
  Description of Artificial Sequence: Synthetic oligonucleotide
atttggtgttgagtccatcat

SEQ ID NO: 5786 - DNA, 24 bp, Artificial Sequence
  Description of Artificial Sequence: Synthetic oligonucleotide
tcagaaagtaacaaaaagaagaag

SEQ ID NO: 5787 - DNA, 22 bp, Artificial Sequence
  Description of Artificial Sequence: Synthetic oligonucleotide
ctcttcagcttctccttgttct

SEQ ID NO: 5788 - DNA, 19 bp, Artificial Sequence
  Description of Artificial Sequence: Synthetic oligonucleotide
ctgtgaccggtggtggtag

SEQ ID NO: 5789 - DNA, 25 bp, Artificial Sequence
  Description of Artificial Sequence: Synthetic oligonucleotide
attttattaacttgactgtggaatt

SEQ ID NO: 5790 - DNA, 21 bp, Artificial Sequence
  Description of Artificial Sequence: Synthetic oligonucleotide
agtgggttcaaagagctgagt

SEQ ID NO: 5791 - DNA, 20 bp, Artificial Sequence
  Description of Artificial Sequence: Synthetic oligonucleotide
atgaagtctctgacgaaaaa

SEQ ID NO: 5792 - DNA, 18 bp, Artificial Sequence
  Description of Artificial Sequence: Synthetic oligonucleotide
caggctctagtccaacgg

SEQ ID NO: 5793 - DNA, 22 bp, Artificial Sequence
  Description of Artificial Sequence: Synthetic oligonucleotide
gcaactctattaacatcttgat

SEQ ID NO: 5794 - DNA, 23 bp, Artificial Sequence
  Description of Artificial Sequence: Synthetic oligonucleotide
aggaaggaaatcaaattcatatc

SEQ ID NO: 5795 - DNA, 19 bp, Artificial Sequence
  Description of Artificial Sequence: Synthetic oligonucleotide
atcctcctaagggagctgg

SEQ ID NO: 5796 - DNA, 20 bp, Artificial Sequence
  Description of Artificial Sequence: Synthetic oligonucleotide
agacagcgatctgtgacaac

SEQ ID NO: 5797 - DNA, 20 bp, Artificial Sequence
  Description of Artificial Sequence: Synthetic oligonucleotide
agatgggatgggtgaaagat

SEQ ID NO: 5798 - DNA, 19 bp, Artificial Sequence
  Description of Artificial Sequence: Synthetic oligonucleotide
taggaggtgcagggtagga

SEQ ID NO: 5799 - DNA, 26 bp, Artificial Sequence
  Description of Artificial Sequence: Synthetic oligonucleotide
tattggaaagtagatgaacagtaatt

SEQ ID NO: 5800 - DNA, 18 bp, Artificial Sequence
  Description of Artificial Sequence: Synthetic oligonucleotide
ttgggcctcagaactctg

SEQ ID NO: 5801 - DNA, 19 bp, Artificial Sequence
  Description of Artificial Sequence: Synthetic oligonucleotide
aatgacaaactaagcgcgg

SEQ ID NO: 5802 - DNA, 20 bp, Artificial Sequence
  Description of Artificial Sequence: Synthetic oligonucleotide
agtctggcctgaaccctatt

SEQ ID NO: 5803 - DNA, 25 bp, Artificial Sequence
  Description of Artificial Sequence: Synthetic oligonucleotide
agagtttgtaattatatgtttgtgg

SEQ ID NO: 5804 - DNA, 22 bp, Artificial Sequence
  Description of Artificial Sequence: Synthetic oligonucleotide
atgctggtgtgtacctgtaatg

SEQ ID NO: 5805 - DNA, 21 bp, Artificial Sequence
  Description of Artificial Sequence: Synthetic oligonucleotide
gtagttgtgtctgcacacctt

SEQ ID NO: 5806 - DNA, 27 bp, Artificial Sequence
  Description of Artificial Sequence: Synthetic oligonucleotide
acttttcttacatttatattttgattt

SEQ ID NO: 5807 - DNA, 21 bp, Artificial Sequence
  Description of Artificial Sequence: Synthetic oligonucleotide
ctgatgacctctgtcaaagct

SEQ ID NO: 5808 - DNA, 19 bp, Artificial Sequence
  Description of Artificial Sequence: Synthetic oligonucleotide
gagggtttcttcctggttt

SEQ ID NO: 5809 - DNA, 23 bp, Artificial Sequence
  Description of Artificial Sequence: Synthetic oligonucleotide
ctcctcacagtagagtggtgtag

SEQ ID NO: 5810 - DNA, 20 bp, Artificial Sequence
  Description of Artificial Sequence: Synthetic oligonucleotide
cctttctgcctgttgaagag

SEQ ID NO: 5811 - DNA, 19 bp, Artificial Sequence
  Description of Artificial Sequence: Synthetic oligonucleotide
ggaccacctgagaaagaca

SEQ ID NO: 5812 - DNA, 26 bp, Artificial Sequence
  Description of Artificial Sequence: Synthetic oligonucleotide
taggcttttgatactatttttttact

SEQ ID NO: 5813 - DNA, 20 bp, Artificial Sequence
  Description of Artificial Sequence: Synthetic oligonucleotide
ctagtgagcccgagagacag

SEQ ID NO: 5814 - DNA, 20 bp, Artificial Sequence
  Description of Artificial Sequence: Synthetic oligonucleotide
gaagcactcgttgacatcac

SEQ ID NO: 5815 - DNA, 20 bp, Artificial Sequence
  Description of Artificial Sequence: Synthetic oligonucleotide
ccaaatgaccctctaccatc

SEQ ID NO: 5816 - DNA, 21 bp, Artificial Sequence
  Description of Artificial Sequence: Synthetic oligonucleotide
atgctgaactcgtatggagag

SEQ ID NO: 5817 - DNA, 26 bp, Artificial Sequence
  Description of Artificial Sequence: Synthetic oligonucleotide
caaaatactattcttattgcaagttt

SEQ ID NO: 5818 - DNA, 21 bp, Artificial Sequence
  Description of Artificial Sequence: Synthetic oligonucleotide
agggtttcttcctggtttctc

SEQ ID NO: 5819 - DNA, 24 bp, Artificial Sequence
  Description of Artificial Sequence: Synthetic oligonucleotide
aggaccctttatctgtcttatttt

SEQ ID NO: 5820 - DNA, 19 bp, Artificial Sequence
  Description of Artificial Sequence: Synthetic oligonucleotide
aagtgcatgtgggagtacc

SEQ ID NO: 5821 - DNA, 27 bp, Artificial Sequence
  Description of Artificial Sequence: Synthetic oligonucleotide
gtgtgatcttgtgagatatatatataa

SEQ ID NO: 5822 - DNA, 20 bp, Artificial Sequence
  Description of Artificial Sequence: Synthetic oligonucleotide
cgtgcttatgaagttggagc

SEQ ID NO: 5823 - DNA, 19 bp, Artificial Sequence
  Description of Artificial Sequence: Synthetic oligonucleotide
gctgcaggaaaagctgaga

SEQ ID NO: 5824 - DNA, 19 bp, Artificial Sequence
  Description of Artificial Sequence: Synthetic oligonucleotide
acagagctgcctttgtgag

SEQ ID NO: 5825 - DNA, 18 bp, Artificial Sequence
  Description of Artificial Sequence: Synthetic oligonucleotide
ttggtccatggaaagcag

SEQ ID NO: 5826 - DNA, 19 bp, Artificial Sequence
  Description of Artificial Sequence: Synthetic oligonucleotide
acagactgaggaccagcac

SEQ ID NO: 5827 - DNA, 19 bp, Artificial Sequence
  Description of Artificial Sequence: Synthetic oligonucleotide
tctcttccactgcattccc

SEQ ID NO: 5828 - DNA, 19 bp, Artificial Sequence
  Description of Artificial Sequence: Synthetic oligonucleotide
aattcctcctgtcccacgt

SEQ ID NO: 5829 - DNA, 20 bp, Artificial Sequence
  Description of Artificial Sequence: Synthetic oligonucleotide
agtttttgcgacggagtttt

SEQ ID NO: 5830 - DNA, 23 bp, Artificial Sequence
  Description of Artificial Sequence: Synthetic oligonucleotide
catatctcccgaaccatatattt

SEQ ID NO: 5831 - DNA, 20 bp, Artificial Sequence
  Description of Artificial Sequence: Synthetic oligonucleotide
aaggtttccctgagtgcttc

SEQ ID NO: 5832 - DNA, 19 bp, Artificial Sequence
  Description of Artificial Sequence: Synthetic oligonucleotide
agagagaaacggcctctgt

SEQ ID NO: 5833 - DNA, 25 bp, Artificial Sequence
  Description of Artificial Sequence: Synthetic oligonucleotide
gtttttaagtctattctaaaaggcc

SEQ ID NO: 5834 - DNA, 25 bp, Artificial Sequence
  Description of Artificial Sequence: Synthetic oligonucleotide
ttctacaagagatatttatggagga

SEQ ID NO: 5835 - DNA, 23 bp, Artificial Sequence
  Description of Artificial Sequence: Synthetic oligonucleotide
ccatcctgagtcttgtttttatt

SEQ ID NO: 5836 - DNA, 18 bp, Artificial Sequence
  Description of Artificial Sequence: Synthetic oligonucleotide
atagggaggaggccaatg

SEQ ID NO: 5837 - DNA, 26 bp, Artificial Sequence
  Description of Artificial Sequence: Synthetic oligonucleotide
tcagttagaagttgtattagtctgtt

SEQ ID NO: 5838 - DNA, 20 bp, Artificial Sequence
  Description of Artificial Sequence: Synthetic oligonucleotide
agagaaaattctagcggcct

SEQ ID NO: 5839 - DNA, 27 bp, Artificial Sequence
  Description of Artificial Sequence: Synthetic oligonucleotide
ctaagacttattatatgtgatgtgtca

SEQ ID NO: 5840 - DNA, 19 bp, Artificial Sequence
  Description of Artificial Sequence: Synthetic oligonucleotide
ggagaggtgagatgagcag

SEQ ID NO: 5841 - DNA, 23 bp, Artificial Sequence
  Description of Artificial Sequence: Synthetic oligonucleotide
tttgtttttgaagacagtttcac

SEQ ID NO: 5842 - DNA, 21 bp, Artificial Sequence
  Description of Artificial Sequence: Synthetic oligonucleotide
ctgggctggaggactaaaata

SEQ ID NO: 5843 - DNA, 23 bp, Artificial Sequence
  Description of Artificial Sequence: Synthetic oligonucleotide
aacatgtacttgtatgcaattgc

SEQ ID NO: 5844 - DNA, 22 bp, Artificial Sequence
  Description of Artificial Sequence: Synthetic oligonucleotide
aactcttaggtttaaacacatt

SEQ ID NO: 5845 - DNA, 23 bp, Artificial Sequence
  Description of Artificial Sequence: Synthetic oligonucleotide
ctatggcaatgatttattcatgt

SEQ ID NO: 5846 - DNA, 20 bp, Artificial Sequence
  Description of Artificial Sequence: Synthetic oligonucleotide
cagcataacccgctaagttg

SEQ ID NO: 5847 - DNA, 21 bp, Artificial Sequence
  Description of Artificial Sequence: Synthetic oligonucleotide
taatcctaccactttgcaagg

SEQ ID NO: 5848 - DNA, 19 bp, Artificial Sequence
  Description of Artificial Sequence: Synthetic oligonucleotide
gggactcaggatgcttggt

SEQ ID NO: 5849 - DNA, 19 bp, Artificial Sequence
  Description of Artificial Sequence: Synthetic oligonucleotide
cacctgctctgtcctcatc

SEQ ID NO: 5850 - DNA, 19 bp, Artificial Sequence
  Description of Artificial Sequence: Synthetic oligonucleotide
ctgagatagcaggggagag

SEQ ID NO: 5851 - DNA, 18 bp, Artificial Sequence
  Description of Artificial Sequence: Synthetic oligonucleotide
tccctgtccctcttcagg

SEQ ID NO: 5852 - DNA, 21 bp, Artificial Sequence
  Description of Artificial Sequence: Synthetic oligonucleotide
acacagtgtccaaatctccat

SEQ ID NO: 5853 - DNA, 23 bp, Artificial Sequence
  Description of Artificial Sequence: Synthetic oligonucleotide
atgtcatctctaagaacagctcc

SEQ ID NO: 5854 - DNA, 23 bp, Artificial Sequence
  Description of Artificial Sequence: Synthetic oligonucleotide
aaagatttgatgttacattttac

SEQ ID NO: 5855 - DNA, 19 bp, Artificial Sequence
  Description of Artificial Sequence: Synthetic oligonucleotide
gcttgttcctcagcctctt

SEQ ID NO: 5856 - DNA, 18 bp, Artificial Sequence
  Description of Artificial Sequence: Synthetic oligonucleotide
accatcatcgcacagctc

SEQ ID NO: 5857 - DNA, 20 bp, Artificial Sequence
  Description of Artificial Sequence: Synthetic oligonucleotide
aggtgtgtcttgctccattt

SEQ ID NO: 5858 - DNA, 21 bp, Artificial Sequence
  Description of Artificial Sequence: Synthetic oligonucleotide
ctcctggctactctctcctgt

SEQ ID NO: 5859 - DNA, 24 bp, Artificial Sequence
  Description of Artificial Sequence: Synthetic oligonucleotide
gaaaaactgaagaaacaaaatttt

SEQ ID NO: 5860 - DNA, 20 bp, Artificial Sequence
  Description of Artificial Sequence: Synthetic oligonucleotide
gagttggttttgggaatgtg

SEQ ID NO: 5861 - DNA, 24 bp, Artificial Sequence
  Description of Artificial Sequence: Synthetic oligonucleotide
tgacttgtttaatgttacaaaagg

SEQ ID NO: 5862 - DNA, 19 bp, Artificial Sequence
  Description of Artificial Sequence: Synthetic oligonucleotide
agctcccactctgtgtcag

SEQ ID NO: 5863 - DNA, 19 bp, Artificial Sequence
  Description of Artificial Sequence: Synthetic oligonucleotide
ctcgatgcttctctgcctt

SEQ ID NO: 5864 - DNA, 23 bp, Artificial Sequence
  Description of Artificial Sequence: Synthetic oligonucleotide
tgagattttgtagtgagatttgg

SEQ ID NO: 5865 - DNA, 20 bp, Artificial Sequence
  Description of Artificial Sequence: Synthetic oligonucleotide
taaagcaaatgattagcccc

SEQ ID NO: 5866 - DNA, 27 bp, Artificial Sequence
  Description of Artificial Sequence: Synthetic oligonucleotide
gtataaatttactttctcaaattcttg

SEQ ID NO: 5867 - DNA, 21 bp, Artificial Sequence
  Description of Artificial Sequence: Synthetic oligonucleotide
gttgtttgttttgagctgctg

SEQ ID NO: 5868 - DNA, 18 bp, Artificial Sequence
  Description of Artificial Sequence: Synthetic oligonucleotide
gctcagctgctctagccc

SEQ ID NO: 5869 - DNA, 19 bp, Artificial Sequence
  Description of Artificial Sequence: Synthetic oligonucleotide
ctgctcatctcacctctcc

SEQ ID NO: 5870 - DNA, 20 bp, Artificial Sequence
  Description of Artificial Sequence: Synthetic oligonucleotide
ctggatatgagcccagtcag

SEQ ID NO: 5871 - DNA, 19 bp, Artificial Sequence
  Description of Artificial Sequence: Synthetic oligonucleotide
ctccacctctcctcctctc

SEQ ID NO: 5872 - DNA, 20 bp, Artificial Sequence
  Description of Artificial Sequence: Synthetic oligonucleotide
attctccgcagaggatttct

SEQ ID NO: 5873 - DNA, 26 bp, Artificial Sequence
  Description of Artificial Sequence: Synthetic oligonucleotide
taaatatacaaaatatcaaagcagtc

SEQ ID NO: 5874 - DNA, 20 bp, Artificial Sequence
  Description of Artificial Sequence: Synthetic oligonucleotide
ctttgtgctccatgtcatct

SEQ ID NO: 5875 - DNA, 27 bp, Artificial Sequence
  Description of Artificial Sequence: Synthetic oligonucleotide
gactgtaatttaaaaatcagaatatat

SEQ ID NO: 5876 - DNA, 19 bp, Artificial Sequence
  Description of Artificial Sequence: Synthetic oligonucleotide
ctcctggtcgtggttgact

SEQ ID NO: 5877 - DNA, 20 bp, Artificial Sequence
  Description of Artificial Sequence: Synthetic oligonucleotide
ctcagcagccctgtactttc

SEQ ID NO: 5878 - DNA, 20 bp, Artificial Sequence
  Description of Artificial Sequence: Synthetic oligonucleotide
cccaggtgaaatcattgaag

SEQ ID NO: 5879 - DNA, 19 bp, Artificial Sequence
  Description of Artificial Sequence: Synthetic oligonucleotide
agccaaaatcaaggaccag

SEQ ID NO: 5880 - DNA, 24 bp, Artificial Sequence
  Description of Artificial Sequence: Synthetic oligonucleotide
ttcttcctgctatatctatcgttt

SEQ ID NO: 5881 - DNA, 20 bp, Artificial Sequence
  Description of Artificial Sequence: Synthetic oligonucleotide
gtagcagtggctgtagggag

SEQ ID NO: 5882 - DNA, 17 bp, Artificial Sequence
  Description of Artificial Sequence: Synthetic oligonucleotide
actttgcccgctttgac

SEQ ID NO: 5883 - DNA, 17 bp, Artificial Sequence
  Description of Artificial Sequence: Synthetic oligonucleotide
tggcctggtggagttag

SEQ ID NO: 5884 - DNA, 25 bp, Artificial Sequence
  Description of Artificial Sequence: Synthetic oligonucleotide
aattatttaatcagctacttccatt

SEQ ID NO: 5885 - DNA, 27 bp, Artificial Sequence
  Description of Artificial Sequence: Synthetic oligonucleotide
ataaaaaaattaataataaagggagtg

SEQ ID NO: 5886 - DNA, 26 bp, Artificial Sequence
  Description of Artificial Sequence: Synthetic oligonucleotide
gatgataaaaatctaagagaagctaa

SEQ ID NO: 5887 - DNA, 21 bp, Artificial Sequence
  Description of Artificial Sequence: Synthetic oligonucleotide
cagggtagaaataaagagcgc

SEQ ID NO: 5888 - DNA, 27 bp, Artificial Sequence
  Description of Artificial Sequence: Synthetic oligonucleotide
tactgttattacttttgcataataaga

SEQ ID NO: 5889 - DNA, 19 bp, Artificial Sequence
  Description of Artificial Sequence: Synthetic oligonucleotide
aggaggaacatgcagagct

SEQ ID NO: 5890 - DNA, 25 bp, Artificial Sequence
  Description of Artificial Sequence: Synthetic oligonucleotide
ccacataaaaaaataagtatgtgaa

SEQ ID NO: 5891 - DNA, 17 bp, Artificial Sequence
  Description of Artificial Sequence: Synthetic oligonucleotide
agcagcaggatggcttc

SEQ ID NO: 5892 - DNA, 21 bp, Artificial Sequence
  Description of Artificial Sequence: Synthetic oligonucleotide
agtccaaagataaagaaaacc

SEQ ID NO: 5893 - DNA, 20 bp, Artificial Sequence
  Description of Artificial Sequence: Synthetic oligonucleotide
agggaaggcagtgaagagag

SEQ ID NO: 5894 - DNA, 17 bp, Artificial Sequence
  Description of Artificial Sequence: Synthetic oligonucleotide
aggtcaccccaatgggt

SEQ ID NO: 5895 - DNA, 17 bp, Artificial Sequence
  Description of Artificial Sequence: Synthetic oligonucleotide
agctcatccctggttgc

SEQ ID NO: 5896 - DNA, 18 bp, Artificial Sequence
  Description of Artificial Sequence: Synthetic oligonucleotide
ccttaaacccaccagctc

SEQ ID NO: 5897 - DNA, 23 bp, Artificial Sequence
  Description of Artificial Sequence: Synthetic oligonucleotide
aatatttctttcatctctttgcc

SEQ ID NO: 5898 - DNA, 19 bp, Artificial Sequence
  Description of Artificial Sequence: Synthetic oligonucleotide
gagcaatcaccagcactgt

SEQ ID NO: 5899 - DNA, 27 bp, Artificial Sequence
  Description of Artificial Sequence: Synthetic oligonucleotide
ttatttacatttctctgacttataatg

SEQ ID NO: 5900 - DNA, 19 bp, Artificial Sequence
  Description of Artificial Sequence: Synthetic oligonucleotide
gagtaggagcaggaggagg

SEQ ID NO: 5901 - DNA, 20 bp, Artificial Sequence
  Description of Artificial Sequence: Synthetic oligonucleotide
ccctttgtgatcattcaaag

SEQ ID NO: 5902 - DNA, 20 bp, Artificial Sequence
  Description of Artificial Sequence: Synthetic oligonucleotide
ggtatgaacagcacgcctac

SEQ ID NO: 5903 - DNA, 17 bp, Artificial Sequence
  Description of Artificial Sequence: Synthetic oligonucleotide
cagatcacgacccccac

SEQ ID NO: 5904 - DNA, 18 bp, Artificial Sequence
  Description of Artificial Sequence: Synthetic oligonucleotide
ggaggaccagaggctgct

SEQ ID NO: 5905 - DNA, 17 bp, Artificial Sequence
  Description of Artificial Sequence: Synthetic oligonucleotide
tagcccctgtgtggatg

SEQ ID NO: 5906 - DNA, 25 bp, Artificial Sequence
  Description of Artificial Sequence: Synthetic oligonucleotide
aaaaaagagttacaaagattaatga

SEQ ID NO: 5907 - DNA, 26 bp, Artificial Sequence
  Description of Artificial Sequence: Synthetic oligonucleotide
tttttaaaatgtaatttgaaaatctt

SEQ ID NO: 5908 - DNA, 27 bp, Artificial Sequence
  Description of Artificial Sequence: Synthetic oligonucleotide
taatatttatacatactttggggtaca

SEQ ID NO: 5909 - DNA, 18 bp, Artificial Sequence
  Description of Artificial Sequence: Synthetic oligonucleotide
ttctgcttcagcgctgag

SEQ ID NO: 5910 - DNA, 19 bp, Artificial Sequence
  Description of Artificial Sequence: Synthetic oligonucleotide
aatcaaagcccatctggac

SEQ ID NO: 5911 - DNA, 18 bp, Artificial Sequence
  Description of Artificial Sequence: Synthetic oligonucleotide
ccttctccacctgctcct

SEQ ID NO: 5912 - DNA, 23 bp, Artificial Sequence
  Description of Artificial Sequence: Synthetic oligonucleotide
tgttttactctttagaaaacgca

SEQ ID NO: 5913 - DNA, 23 bp, Artificial Sequence
  Description of Artificial Sequence: Synthetic oligonucleotide
ctcccaaggatctttagagatta

SEQ ID NO: 5914 - DNA, 19 bp, Artificial Sequence
  Description of Artificial Sequence: Synthetic oligonucleotide
catcagcgtacttggactg

SEQ ID NO: 5915 - DNA, 19 bp, Artificial Sequence
  Description of Artificial Sequence: Synthetic oligonucleotide
gtgtggggttgaaatccag

SEQ ID NO: 5916 - DNA, 27 bp, Artificial Sequence
  Description of Artificial Sequence: Synthetic oligonucleotide
aatattacttttcctttttttgttatt

SEQ ID NO: 5917 - DNA, 24 bp, Artificial Sequence
  Description of Artificial Sequence: Synthetic oligonucleotide
ctgcttgttagtcttatgagaaaa

SEQ ID NO: 5918 - DNA, 26 bp, Artificial Sequence
  Description of Artificial Sequence: Synthetic oligonucleotide
tatttaattgtgtattgttgttgttg

SEQ ID NO: 5919 - DNA, 24 bp, Artificial Sequence
  Description of Artificial Sequence: Synthetic oligonucleotide
tgtctaaaatttgtgtcctttaat

SEQ ID NO: 5920 - DNA, 19 bp, Artificial Sequence
  Description of Artificial Sequence: Synthetic oligonucleotide
ctccaattcccaaagagct

SEQ ID NO: 5921 - DNA, 23 bp, Artificial Sequence
  Description of Artificial Sequence: Synthetic oligonucleotide
ctgagaaaatactaggccttagg

SEQ ID NO: 5922 - DNA, 18 bp, Artificial Sequence
  Description of Artificial Sequence: Synthetic oligonucleotide
agaagggtgcagagggtc

SEQ ID NO: 5923 - DNA, 17 bp, Artificial Sequence
  Description of Artificial Sequence: Synthetic oligonucleotide
agtccgggtgggtgact

SEQ ID NO: 5924 - DNA, 27 bp, Artificial Sequence
  Description of Artificial Sequence: Synthetic oligonucleotide
tcattattgacattactatacataggg

SEQ ID NO: 5925 - DNA, 21 bp, Artificial Sequence
  Description of Artificial Sequence: Synthetic oligonucleotide
tttgtttgtttgagatggagt

SEQ ID NO: 5926 - DNA, 21 bp, Artificial Sequence
  Description of Artificial Sequence: Synthetic oligonucleotide
gtatgaacagttcgcctacga

SEQ ID NO: 5927 - DNA, 18 bp, Artificial Sequence
  Description of Artificial Sequence: Synthetic oligonucleotide
cctgctctctgtcggctc

SEQ ID NO: 5928 - DNA, 26 bp, Artificial Sequence
  Description of Artificial Sequence: Synthetic oligonucleotide
taattaagtgacatgatttttactaa

SEQ ID NO: 5929 - DNA, 17 bp, Artificial Sequence
  Description of Artificial Sequence: Synthetic oligonucleotide
ttgccccagctacttgg

SEQ ID NO: 5930 - DNA, 21 bp, Artificial Sequence
  Description of Artificial Sequence: Synthetic oligonucleotide
gcctcagttttcactggataa

SEQ ID NO: 5931 - DNA, 19 bp, Artificial Sequence
  Description of Artificial Sequence: Synthetic oligonucleotide
aacacagcaatccaggcag

SEQ ID NO: 5932 - DNA, 25 bp, Artificial Sequence
  Description of Artificial Sequence: Synthetic oligonucleotide
tcttgttaacatattttaaagtgca

SEQ ID NO: 5933 - DNA, 23 bp, Artificial Sequence
  Description of Artificial Sequence: Synthetic oligonucleotide
ttctagtttctttaaccaaccct

SEQ ID NO: 5934 - DNA, 23 bp, Artificial Sequence
  Description of Artificial Sequence: Synthetic oligonucleotide
tccagttctgttgcagtatttat

SEQ ID NO: 5935 - DNA, 17 bp, Artificial Sequence
  Description of Artificial Sequence: Synthetic oligonucleotide
aaagagggatggggagg

SEQ ID NO: 5936 - DNA, 22 bp, Artificial Sequence
  Description of Artificial Sequence: Synthetic oligonucleotide
atacaggtgaaatacaaaaaat

SEQ ID NO: 5937 - DNA, 25 bp, Artificial Sequence
  Description of Artificial Sequence: Synthetic oligonucleotide
gtagaatgtatagctttgttgataa

SEQ ID NO: 5938 - DNA, 20 bp, Artificial Sequence
  Description of Artificial Sequence: Synthetic oligonucleotide
aaagcaaaggctcttgcact

SEQ ID NO: 5939 - DNA, 17 bp, Artificial Sequence
  Description of Artificial Sequence: Synthetic oligonucleotide
cccctcaggcatactgc

SEQ ID NO: 5940 - DNA, 27 bp, Artificial Sequence
  Description of Artificial Sequence: Synthetic oligonucleotide
gcattctataatacacttaacatcttt

SEQ ID NO: 5941 - DNA, 23 bp, Artificial Sequence
  Description of Artificial Sequence: Synthetic oligonucleotide
ttttattttatgacacaaaggct

SEQ ID NO: 5942 - DNA, 18 bp, Artificial Sequence
  Description of Artificial Sequence: Synthetic oligonucleotide
gaacaggcaggctctttg

SEQ ID NO: 5943 - DNA, 23 bp, Artificial Sequence
  Description of Artificial Sequence: Synthetic oligonucleotide
tgacaagtgtagatgataaaggg

SEQ ID NO: 5944 - DNA, 27 bp, Artificial Sequence
  Description of Artificial Sequence: Synthetic oligonucleotide
ttatcttattctgtttaactccttatg

SEQ ID NO: 5945 - DNA, 27 bp, Artificial Sequence
  Description of Artificial Sequence: Synthetic oligonucleotide
aatattacaccatttaagatgtattgc

SEQ ID NO: 5946 - DNA, 20 bp, Artificial Sequence
  Description of Artificial Sequence: Synthetic oligonucleotide
gattctccactcccctgagt

SEQ ID NO: 5947 - DNA, 19 bp, Artificial Sequence
  Description of Artificial Sequence: Synthetic oligonucleotide
ccaggctccactcagtgac

SEQ ID NO: 5948 - DNA, 17 bp, Artificial Sequence
  Description of Artificial Sequence: Synthetic oligonucleotide
gagcctgaagggccaac

SEQ ID NO: 5949 - DNA, 27 bp, Artificial Sequence
  Description of Artificial Sequence: Synthetic oligonucleotide
aatgagaattaataatatagaacataa

SEQ ID NO: 5950 - DNA, 23 bp, Artificial Sequence
  Description of Artificial Sequence: Synthetic oligonucleotide
ttttttaagagaggagtcttgct

SEQ ID NO: 5951 - DNA, 27 bp, Artificial Sequence
  Description of Artificial Sequence: Synthetic oligonucleotide
tattaattattaggaataatccattca

SEQ ID NO: 5952 - DNA, 17 bp, Artificial Sequence
  Description of Artificial Sequence: Synthetic oligonucleotide
tttgaggagggagtcgg

SEQ ID NO: 5953 - DNA, 26 bp, Artificial Sequence
  Description of Artificial Sequence: Synthetic oligonucleotide
ttataacatgaaattattgaatttca

SEQ ID NO: 5954 - DNA, 23 bp, Artificial Sequence
  Description of Artificial Sequence: Synthetic oligonucleotide
aacacttactgagaagaccacaa

SEQ ID NO: 5955 - DNA, 19 bp, Artificial Sequence
  Description of Artificial Sequence: Synthetic oligonucleotide
ctgcctcccctaaaaggag

SEQ ID NO: 5956 - DNA, 19 bp, Artificial Sequence
  Description of Artificial Sequence: Synthetic oligonucleotide
caagaagaagtaaaatggc

SEQ ID NO: 5957 - DNA, 27 bp, Artificial Sequence
  Description of Artificial Sequence: Synthetic oligonucleotide
gtttttatcttaatctaatttaaaaat

SEQ ID NO: 5958 - DNA, 18 bp, Artificial Sequence
  Description of Artificial Sequence: Synthetic oligonucleotide
ctgttccctggtttggtg

SEQ ID NO: 5959 - DNA, 24 bp, Artificial Sequence
  Description of Artificial Sequence: Synthetic oligonucleotide
aactggatatctcatcttatgcta

SEQ ID NO: 5960 - DNA, 20 bp, Artificial Sequence
  Description of Artificial Sequence: Synthetic oligonucleotide
aggttctgaaggcttctcct

SEQ ID NO: 5961 - DNA, 26 bp, Artificial Sequence
  Description of Artificial Sequence: Synthetic oligonucleotide
ttaaatttttatacaatcatatttca

SEQ ID NO: 5962 - DNA, 18 bp, Artificial Sequence
  Description of Artificial Sequence: Synthetic oligonucleotide
gccgccgattacataaac

SEQ ID NO: 5963 - DNA, 20 bp, Artificial Sequence
  Description of Artificial Sequence: Synthetic oligonucleotide
acaggacggtaggagaggag

SEQ ID NO: 5964 - DNA, 18 bp, Artificial Sequence
  Description of Artificial Sequence: Synthetic oligonucleotide
gttctcttccgcgccatt

SEQ ID NO: 5965 - DNA, 27 bp, Artificial Sequence
  Description of Artificial Sequence: Synthetic oligonucleotide
gacatagaatataataaccatatttaa

SEQ ID NO: 5966 - DNA, 17 bp, Artificial Sequence
  Description of Artificial Sequence: Synthetic oligonucleotide
cctgtagatctccgggg

SEQ ID NO: 5967 - DNA, 24 bp, Artificial Sequence
  Description of Artificial Sequence: Synthetic oligonucleotide
tgtatggatgtactacaatgtgtc

SEQ ID NO: 5968 - DNA, 22 bp, Artificial Sequence
  Description of Artificial Sequence: Synthetic oligonucleotide
aagaagaagaaaaacaaaaaca

SEQ ID NO: 5969 - DNA, 17 bp, Artificial Sequence
  Description of Artificial Sequence: Synthetic oligonucleotide
aacccagagccagcgat

SEQ ID NO: 5970 - DNA, 16 bp, Artificial Sequence
  Description of Artificial Sequence: Synthetic oligonucleotide
acatctgagccgcctt

SEQ ID NO: 5971 - DNA, 26 bp, Artificial Sequence
  Description of Artificial Sequence: Synthetic oligonucleotide
tttttcatagttcatttaaacataaa

SEQ ID NO: 5972 - DNA, 19 bp, Artificial Sequence
  Description of Artificial Sequence: Synthetic oligonucleotide
caggaatagcccttgggtt

SEQ ID NO: 5973 - DNA, 21 bp, Artificial Sequence
  Description of Artificial Sequence: Synthetic oligonucleotide
gttttctttatctttggactg

SEQ ID NO: 5974 - DNA, 18 bp, Artificial Sequence
  Description of Artificial Sequence: Synthetic oligonucleotide
actcacctgcccaggtct

SEQ ID NO: 5975 - DNA, 23 bp, Artificial Sequence
  Description of Artificial Sequence: Synthetic oligonucleotide
acatgaactcattcctttttatg

SEQ ID NO: 5976 - DNA, 17 bp, Artificial Sequence
  Description of Artificial Sequence: Synthetic oligonucleotide
cttgaggggcccttcag

SEQ ID NO: 5977 - DNA, 18 bp, Artificial Sequence
  Description of Artificial Sequence: Synthetic oligonucleotide
cttgtgccttggatgacc

SEQ ID NO: 5978 - DNA, 18 bp, Artificial Sequence
  Description of Artificial Sequence: Synthetic oligonucleotide
cgaacctgcgaaccacag

SEQ ID NO: 5979 - DNA, 18 bp, Artificial Sequence
  Description of Artificial Sequence: Synthetic oligonucleotide
gatctccacctgcacagg

SEQ ID NO: 5980 - DNA, 23 bp, Artificial Sequence
  Description of Artificial Sequence: Synthetic oligonucleotide
aacaaaaataaacagaccaagac

SEQ ID NO: 5981 - DNA, 18 bp, Artificial Sequence
  Description of Artificial Sequence: Synthetic oligonucleotide
gaccagcacggttctggt

SEQ ID NO: 5982 - DNA, 18 bp, Artificial Sequence
  Description of Artificial Sequence: Synthetic oligonucleotide
cagagaggtggggctgag

SEQ ID NO: 5983 - DNA, 25 bp, Artificial Sequence
  Description of Artificial Sequence: Synthetic oligonucleotide
aaggaagataaatatttagcaaaaa

SEQ ID NO: 5984 - DNA, 19 bp, Artificial Sequence
  Description of Artificial Sequence: Synthetic oligonucleotide
ctgccagcctggaagaact

SEQ ID NO: 5985 - DNA, 18 bp, Artificial Sequence
  Description of Artificial Sequence: Synthetic oligonucleotide
gcaggatctggatgggac

SEQ ID NO: 5986 - DNA, 18 bp, Artificial Sequence
  Description of Artificial Sequence: Synthetic oligonucleotide
aggctgctggcagagtct

SEQ ID NO: 5987 - DNA, 24 bp, Artificial Sequence
  Description of Artificial Sequence: Synthetic oligonucleotide
ataatagtcaaagtaaaagccaca

SEQ ID NO: 5988 - DNA, 26 bp, Artificial Sequence
  Description of Artificial Sequence: Synthetic oligonucleotide
gagagaaaattaataattgttatgaa

SEQ ID NO: 5989 - DNA, 23 bp, Artificial Sequence
  Description of Artificial Sequence: Synthetic oligonucleotide
tttattactttatgggtcactgg

SEQ ID NO: 5990 - DNA, 25 bp, Artificial Sequence
  Description of Artificial Sequence: Synthetic oligonucleotide
acaatttcaatagtttgatatttat

SEQ ID NO: 5991 - DNA, 25 bp, Artificial Sequence
  Description of Artificial Sequence: Synthetic oligonucleotide
acaatttcaatagtttgatatttat

SEQ ID NO: 5992 - DNA, 25 bp, Artificial Sequence
  Description of Artificial Sequence: Synthetic oligonucleotide
aagataaagtgaaaaatgttaattt

SEQ ID NO: 5993 - DNA, 27 bp, Artificial Sequence
  Description of Artificial Sequence: Synthetic oligonucleotide
tctagaaggagagaatatataatagaa

SEQ ID NO: 5994 - DNA, 21 bp, Artificial Sequence
  Description of Artificial Sequence: Synthetic oligonucleotide
gccataggatagtgaaagcaa

SEQ ID NO: 5995 - DNA, 20 bp, Artificial Sequence
  Description of Artificial Sequence: Synthetic oligonucleotide
gagcctgtaaagatgggaac

SEQ ID NO: 5996 - DNA, 18 bp, Artificial Sequence
  Description of Artificial Sequence: Synthetic oligonucleotide
gccctgggttctgtaagc

SEQ ID NO: 5997 - DNA, 18 bp, Artificial Sequence
  Description of Artificial Sequence: Synthetic oligonucleotide
agcctcagcttcgcaagt

SEQ ID NO: 5998 - DNA, 24 bp, Artificial Sequence
  Description of Artificial Sequence: Synthetic oligonucleotide
atagaagtttcatgttccttgaat

SEQ ID NO: 5999 - DNA, 21 bp, Artificial Sequence
  Description of Artificial Sequence: Synthetic oligonucleotide
attttggagatgaagacgtgt

SEQ ID NO: 6000 - DNA, 27 bp, Artificial Sequence
  Description of Artificial Sequence: Synthetic oligonucleotide
aaatgaggctattattaatatctagaa

SEQ ID NO: 6001 - DNA, 27 bp, Artificial Sequence
  Description of Artificial Sequence: Synthetic oligonucleotide
acatttacattgatctatctttatatt

SEQ ID NO: 6002 - DNA, 20 bp, Artificial Sequence
  Description of Artificial Sequence: Synthetic oligonucleotide
atgtaaccaaatacaggatt

SEQ ID NO: 6003 - DNA, 25 bp, Artificial Sequence
  Description of Artificial Sequence: Synthetic oligonucleotide
ataatatagaatgagggataaatga

SEQ ID NO: 6004 - DNA, 19 bp, Artificial Sequence
  Description of Artificial Sequence: Synthetic oligonucleotide
ataaaataaaaaggccggg

SEQ ID NO: 6005 - DNA, 23 bp, Artificial Sequence
  Description of Artificial Sequence: Synthetic oligonucleotide
cctttggtaccaaactcatacta

SEQ ID NO: 6006 - DNA, 21 bp, Artificial Sequence
  Description of Artificial Sequence: Synthetic oligonucleotide
tgtcagaaactggagccatag

SEQ ID NO: 6007 - DNA, 26 bp, Artificial Sequence
  Description of Artificial Sequence: Synthetic oligonucleotide
caaatttatatgtatagagttggtcg

SEQ ID NO: 6008 - DNA, 17 bp, Artificial Sequence
  Description of Artificial Sequence: Synthetic oligonucleotide
aaggaggagggtcggac

SEQ ID NO: 6009 - DNA, 19 bp, Artificial Sequence
  Description of Artificial Sequence: Synthetic oligonucleotide
cttcaccggtgaggactgt

SEQ ID NO: 6010 - DNA, 18 bp, Artificial Sequence
  Description of Artificial Sequence: Synthetic oligonucleotide
accctgagagccatgcct

SEQ ID NO: 6011 - DNA, 23 bp, Artificial Sequence
  Description of Artificial Sequence: Synthetic oligonucleotide
caataacaaacccattacatgtt

SEQ ID NO: 6012 - DNA, 18 bp, Artificial Sequence
  Description of Artificial Sequence: Synthetic oligonucleotide
attggggattccccatct

SEQ ID NO: 6013 - DNA, 23 bp, Artificial Sequence
  Description of Artificial Sequence: Synthetic oligonucleotide
ctgggtaaagtatctgattgaca

SEQ ID NO: 6014 - DNA, 18 bp, Artificial Sequence
  Description of Artificial Sequence: Synthetic oligonucleotide
atccctgaatggaataac

SEQ ID NO: 6015 - DNA, 25 bp, Artificial Sequence
  Description of Artificial Sequence: Synthetic oligonucleotide
ttggaaatataggactaaataaaat

SEQ ID NO: 6016 - DNA, 25 bp, Artificial Sequence
  Description of Artificial Sequence: Synthetic oligonucleotide
tataactggtctcattacactctgg

SEQ ID NO: 6017 - DNA, 21 bp, Artificial Sequence
  Description of Artificial Sequence: Synthetic oligonucleotide
gattttggctgaaaatgaaac

SEQ ID NO: 6018 - DNA, 23 bp, Artificial Sequence
  Description of Artificial Sequence: Synthetic oligonucleotide
aaacatagcatcacttttaccag

SEQ ID NO: 6019 - DNA, 20 bp, Artificial Sequence
  Description of Artificial Sequence: Synthetic oligonucleotide
cacactcacacacacacaca

SEQ ID NO: 6020 - DNA, 23 bp, Artificial Sequence
  Description of Artificial Sequence: Synthetic oligonucleotide
agatagttttccagaacatggtt

SEQ ID NO: 6021 - DNA, 17 bp, Artificial Sequence
  Description of Artificial Sequence: Synthetic oligonucleotide
gtacaactggccccacc

SEQ ID NO: 6022 - DNA, 17 bp, Artificial Sequence
  Description of Artificial Sequence: Synthetic oligonucleotide
atgctgtaggtgtcagc

SEQ ID NO: 6023 - DNA, 25 bp, Artificial Sequence
  Description of Artificial Sequence: Synthetic oligonucleotide
tacttacaattgtacataaaaataa

SEQ ID NO: 6024 - DNA, 27 bp, Artificial Sequence
  Description of Artificial Sequence: Synthetic oligonucleotide
aattagatgtaaaatagatgagaaaaa

SEQ ID NO: 6025 - DNA, 24 bp, Artificial Sequence
  Description of Artificial Sequence: Synthetic oligonucleotide
tccctaatttacagaagagaaact

SEQ ID NO: 6026 - DNA, 20 bp, Artificial Sequence
  Description of Artificial Sequence: Synthetic oligonucleotide
atcaggatccctttttattc

SEQ ID NO: 6027 - DNA, 18 bp, Artificial Sequence
  Description of Artificial Sequence: Synthetic oligonucleotide
cttggcctcaaagtgctg

SEQ ID NO: 6028 - DNA, 26 bp, Artificial Sequence
  Description of Artificial Sequence: Synthetic oligonucleotide
tatttttacaagcacagattataagt

SEQ ID NO: 6029 - DNA, 25 bp, Artificial Sequence
  Description of Artificial Sequence: Synthetic oligonucleotide
caggaattagtcagtatctcataag

SEQ ID NO: 6030 - DNA, 23 bp, Artificial Sequence
  Description of Artificial Sequence: Synthetic oligonucleotide
ttaaagtgtacagatcagtggct

SEQ ID NO: 6031 - DNA, 16 bp, Artificial Sequence
  Description of Artificial Sequence: Synthetic oligonucleotide
caggaggagggttcgg

SEQ ID NO: 6032 - DNA, 25 bp, Artificial Sequence
  Description of Artificial Sequence: Synthetic oligonucleotide
aaaagaaatagtcagttgaaacatt

SEQ ID NO: 6033 - DNA, 27 bp, Artificial Sequence
  Description of Artificial Sequence: Synthetic oligonucleotide
atgacttcattaataggtaatatcaca

SEQ ID NO: 6034 - DNA, 23 bp, Artificial Sequence
  Description of Artificial Sequence: Synthetic oligonucleotide
attacaattcgcataacaattca

SEQ ID NO: 6035 - DNA, 17 bp, Artificial Sequence
  Description of Artificial Sequence: Synthetic oligonucleotide
caccctctcagcggctc

SEQ ID NO: 6036 - DNA, 27 bp, Artificial Sequence
  Description of Artificial Sequence: Synthetic oligonucleotide
ttgtactaacaggatatgtatatatag

SEQ ID NO: 6037 - DNA, 27 bp, Artificial Sequence
  Description of Artificial Sequence: Synthetic oligonucleotide
aactaaatattgtcattaatttaagga

SEQ ID NO: 6038 - DNA, 24 bp, Artificial Sequence
  Description of Artificial Sequence: Synthetic oligonucleotide
tgtaagatgtaaatgtggatatgg

SEQ ID NO: 6039 - DNA, 23 bp, Artificial Sequence
  Description of Artificial Sequence: Synthetic oligonucleotide
agggagctaataattagagggat

SEQ ID NO: 6040 - DNA, 23 bp, Artificial Sequence
  Description of Artificial Sequence: Synthetic oligonucleotide
gcaacaaagtggatattaaggac

SEQ ID NO: 6041 - DNA, 22 bp, Artificial Sequence
  Description of Artificial Sequence: Synthetic oligonucleotide
ccaggttctgtttttgttctac

SEQ ID NO: 6042 - DNA, 22 bp, Artificial Sequence
  Description of Artificial Sequence: Synthetic oligonucleotide
cacacttacaatgaggtaaggg

SEQ ID NO: 6043 - DNA, 23 bp, Artificial Sequence
  Description of Artificial Sequence: Synthetic oligonucleotide
ctacaggcccttaggaattatta

SEQ ID NO: 6044 - DNA, 24 bp, Artificial Sequence
  Description of Artificial Sequence: Synthetic oligonucleotide
tggtagttattcttttgtatgcac

SEQ ID NO: 6045 - DNA, 19 bp, Artificial Sequence
  Description of Artificial Sequence: Synthetic oligonucleotide
cgaggaggaggaagtcgag

SEQ ID NO: 6046 - DNA, 16 bp, Artificial Sequence
  Description of Artificial Sequence: Synthetic oligonucleotide
caggtcacgaccaccc

SEQ ID NO: 6047 - DNA, 19 bp, Artificial Sequence
  Description of Artificial Sequence: Synthetic oligonucleotide
gtgggcttgcacctgtagt

SEQ ID NO: 6048 - DNA, 26 bp, Artificial Sequence
  Description of Artificial Sequence: Synthetic oligonucleotide
aatacaaatgtacttattttcagatg

SEQ ID NO: 6049 - DNA, 23 bp, Artificial Sequence
  Description of Artificial Sequence: Synthetic oligonucleotide
agggaagacaaaaatgttttatt

SEQ ID NO: 6050 - DNA, 22 bp, Artificial Sequence
  Description of Artificial Sequence: Synthetic oligonucleotide
agatgtatgggacacatctctt

SEQ ID NO: 6051 - DNA, 23 bp, Artificial Sequence
  Description of Artificial Sequence: Synthetic oligonucleotide
aatgttcaatgtgaaaaaggata

SEQ ID NO: 6052 - DNA, 22 bp, Artificial Sequence
  Description of Artificial Sequence: Synthetic oligonucleotide
cacttatttcttttggaatgga

SEQ ID NO: 6053 - DNA, 22 bp, Artificial Sequence
  Description of Artificial Sequence: Synthetic oligonucleotide
ctctcaattctgttctcagcac

SEQ ID NO: 6054 - DNA, 22 bp, Artificial Sequence
  Description of Artificial Sequence: Synthetic oligonucleotide
agtcaaagaaacctcatagcac

SEQ ID NO: 6055 - DNA, 23 bp, Artificial Sequence
  Description of Artificial Sequence: Synthetic oligonucleotide
ctctggggagtatatgtttgaat

SEQ ID NO: 6056 - DNA, 19 bp, Artificial Sequence
  Description of Artificial Sequence: Synthetic oligonucleotide
gtccgagtgccaatggcta

SEQ ID NO: 6057 - DNA, 22 bp, Artificial Sequence
  Description of Artificial Sequence: Synthetic oligonucleotide
ggctgtactcaagatcaagtct

SEQ ID NO: 6058 - DNA, 16 bp, Artificial Sequence
  Description of Artificial Sequence: Synthetic oligonucleotide
aggaccccatggcagt

SEQ ID NO: 6059 - DNA, 23 bp, Artificial Sequence
  Description of Artificial Sequence: Synthetic oligonucleotide
aagtgaaacttaggagctttgtg

SEQ ID NO: 6060 - DNA, 22 bp, Artificial Sequence
  Description of Artificial Sequence: Synthetic oligonucleotide
ataaggctgctaagcaagtctc

SEQ ID NO: 6061 - DNA, 22 bp, Artificial Sequence
  Description of Artificial Sequence: Synthetic oligonucleotide
tgctcaatgtgaaaaaggatag

SEQ ID NO: 6062 - DNA, 16 bp, Artificial Sequence
  Description of Artificial Sequence: Synthetic oligonucleotide
tttccctcctgacccc

SEQ ID NO: 6063 - DNA, 21 bp, Artificial Sequence
  Description of Artificial Sequence: Synthetic oligonucleotide
ctcttctcctacaccaagcat

SEQ ID NO: 6064 - DNA, 23 bp, Artificial Sequence
  Description of Artificial Sequence: Synthetic oligonucleotide
gactgacctggattagtttatga

SEQ ID NO: 6065 - DNA, 21 bp, Artificial Sequence
  Description of Artificial Sequence: Synthetic oligonucleotide
ctctctggaacaggaaagatg

SEQ ID NO: 6066 - DNA, 21 bp, Artificial Sequence
  Description of Artificial Sequence: Synthetic oligonucleotide
gactctaaagcagtggaggag

SEQ ID NO: 6067 - DNA, 26 bp, Artificial Sequence
  Description of Artificial Sequence: Synthetic oligonucleotide
atgattaaattatatattgtctatgt

SEQ ID NO: 6068 - DNA, 23 bp, Artificial Sequence
  Description of Artificial Sequence: Synthetic oligonucleotide
ctgaaatatggtttctcctggta

SEQ ID NO: 6069 - DNA, 21 bp, Artificial Sequence
  Description of Artificial Sequence: Synthetic oligonucleotide
attctttgattgggatgtttc

SEQ ID NO: 6070 - DNA, 22 bp, Artificial Sequence
  Description of Artificial Sequence: Synthetic oligonucleotide
ctctggagattctttgatttgg

SEQ ID NO: 6071 - DNA, 24 bp, Artificial Sequence
  Description of Artificial Sequence: Synthetic oligonucleotide
tttatgtaactagtgtgcgtatca

SEQ ID NO: 6072 - DNA, 21 bp, Artificial Sequence
  Description of Artificial Sequence: Synthetic oligonucleotide
tcaggttaccccagttactca

SEQ ID NO: 6073 - DNA, 17 bp, Artificial Sequence
  Description of Artificial Sequence: Synthetic oligonucleotide
aagtcccttagctgctc

SEQ ID NO: 6074 - DNA, 16 bp, Artificial Sequence
  Description of Artificial Sequence: Synthetic oligonucleotide
cgcaaggaggagggtc

SEQ ID NO: 6075 - DNA, 21 bp, Artificial Sequence
  Description of Artificial Sequence: Synthetic oligonucleotide
gccaatttgtaaagtggtatg

SEQ ID NO: 6076 - DNA, 21 bp, Artificial Sequence
  Description of Artificial Sequence: Synthetic oligonucleotide
gcctataactggtctcctggt

SEQ ID NO: 6077 - DNA, 21 bp, Artificial Sequence
  Description of Artificial Sequence: Synthetic oligonucleotide
ggaccttgcacttttcctatt

SEQ ID NO: 6078 - DNA, 21 bp, Artificial Sequence
  Description of Artificial Sequence: Synthetic oligonucleotide
catttctctggtgacatttcc

SEQ ID NO: 6079 - DNA, 24 bp, Artificial Sequence
  Description of Artificial Sequence: Synthetic oligonucleotide
agtgtgagatagagagtatggaag

SEQ ID NO: 6080 - DNA, 21 bp, Artificial Sequence
  Description of Artificial Sequence: Synthetic oligonucleotide
aaggaaacagggaccttaatc

SEQ ID NO: 6081 - DNA, 21 bp, Artificial Sequence
  Description of Artificial Sequence: Synthetic oligonucleotide
ctctaggatacccaggacctc

SEQ ID NO: 6082 - DNA, 21 bp, Artificial Sequence
  Description of Artificial Sequence: Synthetic oligonucleotide
aatcaagaaatcagggaaagc

SEQ ID NO: 6083 - DNA, 22 bp, Artificial Sequence
  Description of Artificial Sequence: Synthetic oligonucleotide
caaaaacagaacctggtcagat

SEQ ID NO: 6084 - DNA, 22 bp, Artificial Sequence
  Description of Artificial Sequence: Synthetic oligonucleotide
catcattattatttttgagaca

SEQ ID NO: 6085 - DNA, 16 bp, Artificial Sequence
  Description of Artificial Sequence: Synthetic oligonucleotide
cagcgtgcccacagtc

SEQ ID NO: 6086 - DNA, 21 bp, Artificial Sequence
  Description of Artificial Sequence: Synthetic oligonucleotide
agacagcaggatgatgagtgt

SEQ ID NO: 6087 - DNA, 20 bp, Artificial Sequence
  Description of Artificial Sequence: Synthetic oligonucleotide
cctcctgtgcatctgtactc

SEQ ID NO: 6088 - DNA, 22 bp, Artificial Sequence
  Description of Artificial Sequence: Synthetic oligonucleotide
aaaggggagagaaaaagtaaag

SEQ ID NO: 6089 - DNA, 21 bp, Artificial Sequence
  Description of Artificial Sequence: Synthetic oligonucleotide
cctcatcttcaacttttgtgc

SEQ ID NO: 6090 - DNA, 21 bp, Artificial Sequence
  Description of Artificial Sequence: Synthetic oligonucleotide
ggactgtctccttctcacctc

SEQ ID NO: 6091 - DNA, 20 bp, Artificial Sequence
  Description of Artificial Sequence: Synthetic oligonucleotide
cattcctcagagggtttcat

SEQ ID NO: 6092 - DNA, 27 bp, Artificial Sequence
  Description of Artificial Sequence: Synthetic oligonucleotide
attatccattaaagattatactatcca

SEQ ID NO: 6093 - DNA, 21 bp, Artificial Sequence
  Description of Artificial Sequence: Synthetic oligonucleotide
aagtgaagaaatgacacgacc

SEQ ID NO: 6094 - DNA, 20 bp, Artificial Sequence
  Description of Artificial Sequence: Synthetic oligonucleotide
agggacagtttgaccacttc

SEQ ID NO: 6095 - DNA, 20 bp, Artificial Sequence
  Description of Artificial Sequence: Synthetic oligonucleotide
gtttgtccgaaaagtgagag

SEQ ID NO: 6096 - DNA, 25 bp, Artificial Sequence
  Description of Artificial Sequence: Synthetic oligonucleotide
tttttaatatactgttgaatgtggt

SEQ ID NO: 6097 - DNA, 21 bp, Artificial Sequence
  Description of Artificial Sequence: Synthetic oligonucleotide
ccctccccttgtttgttttta

SEQ ID NO: 6098 - DNA, 21 bp, Artificial Sequence
  Description of Artificial Sequence: Synthetic oligonucleotide
aatgacttctcgcttgaactt

SEQ ID NO: 6099 - DNA, 24 bp, Artificial Sequence
  Description of Artificial Sequence: Synthetic oligonucleotide
ttccaggaattgacttatttaatt

SEQ ID NO: 6100 - DNA, 20 bp, Artificial Sequence
  Description of Artificial Sequence: Synthetic oligonucleotide
ggttttctgatcctgacctg

SEQ ID NO: 6101 - DNA, 21 bp, Artificial Sequence
  Description of Artificial Sequence: Synthetic oligonucleotide
gtaatcacaggtcaggggaag

SEQ ID NO: 6102 - DNA, 20 bp, Artificial Sequence
  Description of Artificial Sequence: Synthetic oligonucleotide
ccacacacattgagtgtgag

SEQ ID NO: 6103 - DNA, 26 bp, Artificial Sequence
  Description of Artificial Sequence: Synthetic oligonucleotide
ctactcttttcatgtttcatttattt

SEQ ID NO: 6104 - DNA, 20 bp, Artificial Sequence
  Description of Artificial Sequence: Synthetic oligonucleotide
tggacaagtttccactgaag

SEQ ID NO: 6105 - DNA, 21 bp, Artificial Sequence
  Description of Artificial Sequence: Synthetic oligonucleotide
tgttcctggttaaaaaaaaaa

SEQ ID NO: 6106 - DNA, 21 bp, Artificial Sequence
  Description of Artificial Sequence: Synthetic oligonucleotide
agtatcatttcccttcagcct

SEQ ID NO: 6107 - DNA, 24 bp, Artificial Sequence
  Description of Artificial Sequence: Synthetic oligonucleotide
ttaggatataggacattctgttgc

SEQ ID NO: 6108 - DNA, 22 bp, Artificial Sequence
  Description of Artificial Sequence: Synthetic oligonucleotide
tctgactgataaaccctcactc

SEQ ID NO: 6109 - DNA, 22 bp, Artificial Sequence
  Description of Artificial Sequence: Synthetic oligonucleotide
ttggaatcttcaacttctgaag

SEQ ID NO: 6110 - DNA, 23 bp, Artificial Sequence
  Description of Artificial Sequence: Synthetic oligonucleotide
ttagaagatggtccaccctatta

SEQ ID NO: 6111 - DNA, 24 bp, Artificial Sequence
  Description of Artificial Sequence: Synthetic oligonucleotide
gcagtcttgtagctagaacttctc

SEQ ID NO: 6112 - DNA, 23 bp, Artificial Sequence
  Description of Artificial Sequence: Synthetic oligonucleotide
ttttaatctttctaaccacagca

SEQ ID NO: 6113 - DNA, 23 bp, Artificial Sequence
  Description of Artificial Sequence: Synthetic oligonucleotide
ccatgggaataaagaataaggat

SEQ ID NO: 6114 - DNA, 24 bp, Artificial Sequence
  Description of Artificial Sequence: Synthetic oligonucleotide
cataaagaatgttgaaaagagctt

SEQ ID NO: 6115 - DNA, 22 bp, Artificial Sequence
  Description of Artificial Sequence: Synthetic oligonucleotide
gagctctaaggctgttctgatc

SEQ ID NO: 6116 - DNA, 25 bp, Artificial Sequence
  Description of Artificial Sequence: Synthetic oligonucleotide
caatgacttttaatggtaatatgtg

SEQ ID NO: 6117 - DNA, 23 bp, Artificial Sequence
  Description of Artificial Sequence: Synthetic oligonucleotide
gtcaaagaatttaactcctcgtg

SEQ ID NO: 6118 - DNA, 25 bp, Artificial Sequence
  Description of Artificial Sequence: Synthetic oligonucleotide
gtaaattgaaaatattgtgagttga

SEQ ID NO: 6119 - DNA, 21 bp, Artificial Sequence
  Description of Artificial Sequence: Synthetic oligonucleotide
gagagtaggagactggagacc

SEQ ID NO: 6120 - DNA, 21 bp, Artificial Sequence
  Description of Artificial Sequence: Synthetic oligonucleotide
cagtcctccctctgtactctg

SEQ ID NO: 6121 - DNA, 21 bp, Artificial Sequence
  Description of Artificial Sequence: Synthetic oligonucleotide
ctaagaaaaagccttcaaccc

SEQ ID NO: 6122 - DNA, 23 bp, Artificial Sequence
  Description of Artificial Sequence: Synthetic oligonucleotide
ttggaaatcttttttcattaagc

SEQ ID NO: 6123 - DNA, 24 bp, Artificial Sequence
  Description of Artificial Sequence: Synthetic oligonucleotide
tatttactcagctgactgagaatt

SEQ ID NO: 6124 - DNA, 24 bp, Artificial Sequence
  Description of Artificial Sequence: Synthetic oligonucleotide
aattgctctatgttgtatctcctt

SEQ ID NO: 6125 - DNA, 22 bp, Artificial Sequence
  Description of Artificial Sequence: Synthetic oligonucleotide
ggaacttaaatcttgttcgcat

SEQ ID NO: 6126 - DNA, 23 bp, Artificial Sequence
  Description of Artificial Sequence: Synthetic oligonucleotide
agataaaaattctctaggcagga

SEQ ID NO: 6127 - DNA, 23 bp, Artificial Sequence
  Description of Artificial Sequence: Synthetic oligonucleotide
atttcaatacaaactactccgtc

SEQ ID NO: 6128 - DNA, 21 bp, Artificial Sequence
  Description of Artificial Sequence: Synthetic oligonucleotide
tgcatttagctgtcgagtctt

SEQ ID NO: 6129 - DNA, 24 bp, Artificial Sequence
  Description of Artificial Sequence: Synthetic oligonucleotide
ttacactgagcagagtaaacagat

SEQ ID NO: 6130 - DNA, 21 bp, Artificial Sequence
  Description of Artificial Sequence: Synthetic oligonucleotide
gacagcacagacaggaaacat

SEQ ID NO: 6131 - DNA, 23 bp, Artificial Sequence
  Description of Artificial Sequence: Synthetic oligonucleotide
aaaatgttccaacaagcaattat

SEQ ID NO: 6132 - DNA, 20 bp, Artificial Sequence
  Description of Artificial Sequence: Synthetic oligonucleotide
cagaccaggaactaccacac

SEQ ID NO: 6133 - DNA, 21 bp, Artificial Sequence
  Description of Artificial Sequence: Synthetic oligonucleotide
tagaccctcctcccttcctat

SEQ ID NO: 6134 - DNA, 21 bp, Artificial Sequence
  Description of Artificial Sequence: Synthetic oligonucleotide
ctacacaggagtacaaggtgg

SEQ ID NO: 6135 - DNA, 20 bp, Artificial Sequence
  Description of Artificial Sequence: Synthetic oligonucleotide
cctgatcctgacttctgatc

SEQ ID NO: 6136 - DNA, 21 bp, Artificial Sequence
  Description of Artificial Sequence: Synthetic oligonucleotide
aggggtcatgtcttttctcag

SEQ ID NO: 6137 - DNA, 22 bp, Artificial Sequence
  Description of Artificial Sequence: Synthetic oligonucleotide
gacatagcatcagattctcagc

SEQ ID NO: 6138 - DNA, 22 bp, Artificial Sequence
  Description of Artificial Sequence: Synthetic oligonucleotide
tttgcaagggatatgaaggata

SEQ ID NO: 6139 - DNA, 23 bp, Artificial Sequence
  Description of Artificial Sequence: Synthetic oligonucleotide
cccaaatttagtaatctcacaag

SEQ ID NO: 6140 - DNA, 25 bp, Artificial Sequence
  Description of Artificial Sequence: Synthetic oligonucleotide
cagagtgtctaatagaagtgaacat

SEQ ID NO: 6141 - DNA, 22 bp, Artificial Sequence
  Description of Artificial Sequence: Synthetic oligonucleotide
ccagtcaacacatagtgtgttg

SEQ ID NO: 6142 - DNA, 20 bp, Artificial Sequence
  Description of Artificial Sequence: Synthetic oligonucleotide
ggaaacactatgttgcctcc

SEQ ID NO: 6143 - DNA, 20 bp, Artificial Sequence
  Description of Artificial Sequence: Synthetic oligonucleotide
aatggcaatgctaagtgacc

SEQ ID NO: 6144 - DNA, 23 bp, Artificial Sequence
  Description of Artificial Sequence: Synthetic oligonucleotide
aaacaatttcctggatgtttaaa

SEQ ID NO: 6145 - DNA, 24 bp, Artificial Sequence
  Description of Artificial Sequence: Synthetic oligonucleotide
ttgaagatgaagaaattaggactt

SEQ ID NO: 6146 - DNA, 20 bp, Artificial Sequence
  Description of Artificial Sequence: Synthetic oligonucleotide
ctcctcctgggggtatttta

SEQ ID NO: 6147 - DNA, 21 bp, Artificial Sequence
  Description of Artificial Sequence: Synthetic oligonucleotide
cccagttactaatccctaccc

SEQ ID NO: 6148 - DNA, 19 bp, Artificial Sequence
  Description of Artificial Sequence: Synthetic oligonucleotide
tccagggtaaggttttcag

SEQ ID NO: 6149 - DNA, 20 bp, Artificial Sequence
  Description of Artificial Sequence: Synthetic oligonucleotide
aaaataaaagttggggaggg

SEQ ID NO: 6150 - DNA, 26 bp, Artificial Sequence
  Description of Artificial Sequence: Synthetic oligonucleotide
gtgttctaactgtttcataatatctg

SEQ ID NO: 6151 - DNA, 19 bp, Artificial Sequence
  Description of Artificial Sequence: Synthetic oligonucleotide
tgtcctcctgaggtctgtc

SEQ ID NO: 6152 - DNA, 20 bp, Artificial Sequence
  Description of Artificial Sequence: Synthetic oligonucleotide
ctcccgaactagggacaaag

SEQ ID NO: 6153 - DNA, 19 bp, Artificial Sequence
  Description of Artificial Sequence: Synthetic oligonucleotide
cttttcgaccaccattttg

SEQ ID NO: 6154 - DNA, 20 bp, Artificial Sequence
  Description of Artificial Sequence: Synthetic oligonucleotide
gtactgtgttcccttctgcc

SEQ ID NO: 6155 - DNA, 25 bp, Artificial Sequence
  Description of Artificial Sequence: Synthetic oligonucleotide
tattctattgtatgatttacttgcc

SEQ ID NO: 6156 - DNA, 20 bp, Artificial Sequence
  Description of Artificial Sequence: Synthetic oligonucleotide
ctgaatccgataccgcttct

SEQ ID NO: 6157 - DNA, 21 bp, Artificial Sequence
  Description of Artificial Sequence: Synthetic oligonucleotide
gagccaggctggtagtgatac

SEQ ID NO: 6158 - DNA, 20 bp, Artificial Sequence
  Description of Artificial Sequence: Synthetic oligonucleotide
aatccccagatgagcagcta

SEQ ID NO: 6159 - DNA, 22 bp, Artificial Sequence
  Description of Artificial Sequence: Synthetic oligonucleotide
gttcattgtccacagtgtcact

SEQ ID NO: 6160 - DNA, 19 bp, Artificial Sequence
  Description of Artificial Sequence: Synthetic oligonucleotide
agatggcctgttctatgcg

SEQ ID NO: 6161 - DNA, 24 bp, Artificial Sequence
  Description of Artificial Sequence: Synthetic oligonucleotide
attaccgagagagtagtctgactg

SEQ ID NO: 6162 - DNA, 25 bp, Artificial Sequence
  Description of Artificial Sequence: Synthetic oligonucleotide
ctacaatagaagggaaaagatattg

SEQ ID NO: 6163 - DNA, 26 bp, Artificial Sequence
  Description of Artificial Sequence: Synthetic oligonucleotide
aacttagattttacttaaaaaattgc

SEQ ID NO: 6164 - DNA, 23 bp, Artificial Sequence
  Description of Artificial Sequence: Synthetic oligonucleotide
actcacaaatcttcaatatcctc

SEQ ID NO: 6165 - DNA, 21 bp, Artificial Sequence
  Description of Artificial Sequence: Synthetic oligonucleotide
gtcacctacatgcctgtctgt

SEQ ID NO: 6166 - DNA, 21 bp, Artificial Sequence
  Description of Artificial Sequence: Synthetic oligonucleotide
cactagtctgagcaccctctg

SEQ ID NO: 6167 - DNA, 22 bp, Artificial Sequence
  Description of Artificial Sequence: Synthetic oligonucleotide
caggtaatatttcagccatgat

SEQ ID NO: 6168 - DNA, 23 bp, Artificial Sequence
  Description of Artificial Sequence: Synthetic oligonucleotide
ggttcatatatttcttcagcctt

SEQ ID NO: 6169 - DNA, 20 bp, Artificial Sequence
  Description of Artificial Sequence: Synthetic oligonucleotide
gtcatccttaggtgaggtgg

SEQ ID NO: 6170 - DNA, 24 bp, Artificial Sequence
  Description of Artificial Sequence: Synthetic oligonucleotide
tgagactctaagattcagagcttt

SEQ ID NO: 6171 - DNA, 20 bp, Artificial Sequence
  Description of Artificial Sequence: Synthetic oligonucleotide
ctagactctacagccaggcg

SEQ ID NO: 6172 - DNA, 19 bp, Artificial Sequence
  Description of Artificial Sequence: Synthetic oligonucleotide
tcagtaagaggctcaaggg

SEQ ID NO: 6173 - DNA, 25 bp, Artificial Sequence
  Description of Artificial Sequence: Synthetic oligonucleotide
tactactactaagcattcactggtg

SEQ ID NO: 6174 - DNA, 19 bp, Artificial Sequence
  Description of Artificial Sequence: Synthetic oligonucleotide
acagttgactaccctggcc

SEQ ID NO: 6175 - DNA, 27 bp, Artificial Sequence
  Description of Artificial Sequence: Synthetic oligonucleotide
ttacattattaatacatcaaccctatg

SEQ ID NO: 6176 - DNA, 23 bp, Artificial Sequence
  Description of Artificial Sequence: Synthetic oligonucleotide
atgtccctatcctacagatcttc

SEQ ID NO: 6177 - DNA, 23 bp, Artificial Sequence
  Description of Artificial Sequence: Synthetic oligonucleotide
aattactatttgaccccagagtg

SEQ ID NO: 6178 - DNA, 23 bp, Artificial Sequence
  Description of Artificial Sequence: Synthetic oligonucleotide
tgtgtagaagtaggacctcacag

SEQ ID NO: 6179 - DNA, 24 bp, Artificial Sequence
  Description of Artificial Sequence: Synthetic oligonucleotide
agattttacccttactgtaggtca

SEQ ID NO: 6180 - DNA, 23 bp, Artificial Sequence
  Description of Artificial Sequence: Synthetic oligonucleotide
cctgtagtacatcaattccaaca

SEQ ID NO: 6181 - DNA, 24 bp, Artificial Sequence
  Description of Artificial Sequence: Synthetic oligonucleotide
gataaagaaatctcagcaaagaag

SEQ ID NO: 6182 - DNA, 23 bp, Artificial Sequence
  Description of Artificial Sequence: Synthetic oligonucleotide
agcttagaatcctcatgtcatct

SEQ ID NO: 6183 - DNA, 23 bp, Artificial Sequence
  Description of Artificial Sequence: Synthetic oligonucleotide
tgcacacatttttagaaaagatt

SEQ ID NO: 6184 - DNA, 23 bp, Artificial Sequence
  Description of Artificial Sequence: Synthetic oligonucleotide
accgattctttgaaaaatacttg

SEQ ID NO: 6185 - DNA, 23 bp, Artificial Sequence
  Description of Artificial Sequence: Synthetic oligonucleotide
atctgatgcagtgattcaataaa

SEQ ID NO: 6186 - DNA, 23 bp, Artificial Sequence
  Description of Artificial Sequence: Synthetic oligonucleotide
ctgactttaggctacttttcctt

SEQ ID NO: 6187 - DNA, 24 bp, Artificial Sequence
  Description of Artificial Sequence: Synthetic oligonucleotide
gtcaagaaatgtaatttgtccttt

SEQ ID NO: 6188 - DNA, 24 bp, Artificial Sequence
  Description of Artificial Sequence: Synthetic oligonucleotide
agcatgagtgtacaattatctgtg

SEQ ID NO: 6189 - DNA, 23 bp, Artificial Sequence
  Description of Artificial Sequence: Synthetic oligonucleotide
ttatctggctgtgtttttgttta

SEQ ID NO: 6190 - DNA, 22 bp, Artificial Sequence
  Description of Artificial Sequence: Synthetic oligonucleotide
tcactcagtagatgtcccctaa

SEQ ID NO: 6191 - DNA, 22 bp, Artificial Sequence
  Description of Artificial Sequence: Synthetic oligonucleotide
catcttgaagtctaggactcca

SEQ ID NO: 6192 - DNA, 23 bp, Artificial Sequence
  Description of Artificial Sequence: Synthetic oligonucleotide
gacaagctctagacatgatcttg

SEQ ID NO: 6193 - DNA, 23 bp, Artificial Sequence
  Description of Artificial Sequence: Synthetic oligonucleotide
actgggactaaagaaacagaaaa

SEQ ID NO: 6194 - DNA, 23 bp, Artificial Sequence
  Description of Artificial Sequence: Synthetic oligonucleotide
tacttaaatcactccctggctac

SEQ ID NO: 6195 - DNA, 23 bp, Artificial Sequence
  Description of Artificial Sequence: Synthetic oligonucleotide
caacaggaagttgtcaatgatat

SEQ ID NO: 6196 - DNA, 23 bp, Artificial Sequence
  Description of Artificial Sequence: Synthetic oligonucleotide
tgtttgtggtatgagtggtttta

SEQ ID NO: 6197 - DNA, 24 bp, Artificial Sequence
  Description of Artificial Sequence: Synthetic oligonucleotide
gttagttgtctcaaagacaaaaac

SEQ ID NO: 6198 - DNA, 22 bp, Artificial Sequence
  Description of Artificial Sequence: Synthetic oligonucleotide
tgtttgcctttatctctttcag

SEQ ID NO: 6199 - DNA, 24 bp, Artificial Sequence
  Description of Artificial Sequence: Synthetic oligonucleotide
agaaactgatagaagaacctaggg

SEQ ID NO: 6200 - DNA, 24 bp, Artificial Sequence
  Description of Artificial Sequence: Synthetic oligonucleotide
catataggtgtcctttagtatgga

SEQ ID NO: 6201 - DNA, 24 bp, Artificial Sequence
  Description of Artificial Sequence: Synthetic oligonucleotide
aagtccttccaactaaatgtattt

SEQ ID NO: 6202 - DNA, 22 bp, Artificial Sequence
  Description of Artificial Sequence: Synthetic oligonucleotide
gataaccttggacagacaaggt

SEQ ID NO: 6203 - DNA, 23 bp, Artificial Sequence
  Description of Artificial Sequence: Synthetic oligonucleotide
tctttgctcattaaatctggaat

SEQ ID NO: 6204 - DNA, 24 bp, Artificial Sequence
  Description of Artificial Sequence: Synthetic oligonucleotide
gaactttctggagtatattaaggc

SEQ ID NO: 6205 - DNA, 22 bp, Artificial Sequence
  Description of Artificial Sequence: Synthetic oligonucleotide
gatggaaaacaaagcaatactt

SEQ ID NO: 6206 - DNA, 24 bp, Artificial Sequence
  Description of Artificial Sequence: Synthetic oligonucleotide
gcatgatagttacaaaattgtcag

SEQ ID NO: 6207 - DNA, 22 bp, Artificial Sequence
  Description of Artificial Sequence: Synthetic oligonucleotide
cttgttccccaacatattttct

SEQ ID NO: 6208 - DNA, 22 bp, Artificial Sequence
  Description of Artificial Sequence: Synthetic oligonucleotide
taagatgtcgcagactttaagc

SEQ ID NO: 6209 - DNA, 24 bp, Artificial Sequence
  Description of Artificial Sequence: Synthetic oligonucleotide
gctagactttacagaatgattcct

SEQ ID NO: 6210 - DNA, 23 bp, Artificial Sequence
  Description of Artificial Sequence: Synthetic oligonucleotide
agtagaattatccagcaattcag

SEQ ID NO: 6211 - DNA, 22 bp, Artificial Sequence
  Description of Artificial Sequence: Synthetic oligonucleotide
ggtgatactctaagaagcccac

SEQ ID NO: 6212 - DNA, 23 bp, Artificial Sequence
  Description of Artificial Sequence: Synthetic oligonucleotide
tacctcttattgtggaaacctgt

SEQ ID NO: 6213 - DNA, 23 bp, Artificial Sequence
  Description of Artificial Sequence: Synthetic oligonucleotide
cacaacaaatgtcaggtgaatta

SEQ ID NO: 6214 - DNA, 22 bp, Artificial Sequence
  Description of Artificial Sequence: Synthetic oligonucleotide
tccacagtcatactcatctctc

SEQ ID NO: 6215 - DNA, 23 bp, Artificial Sequence
  Description of Artificial Sequence: Synthetic oligonucleotide
agtactctgatgcatctcatgat

SEQ ID NO: 6216 - DNA, 24 bp, Artificial Sequence
  Description of Artificial Sequence: Synthetic oligonucleotide
ttcttccaatgtaagtagttcttg

SEQ ID NO: 6217 - DNA, 22 bp, Artificial Sequence
  Description of Artificial Sequence: Synthetic oligonucleotide
ctggtccattcaaaactacaaa

SEQ ID NO: 6218 - DNA, 23 bp, Artificial Sequence
  Description of Artificial Sequence: Synthetic oligonucleotide
atgtgtcagatttaaggccatat

SEQ ID NO: 6219 - DNA, 22 bp, Artificial Sequence
  Description of Artificial Sequence: Synthetic oligonucleotide
agtctatctaaggaatggaggg

SEQ ID NO: 6220 - DNA, 22 bp, Artificial Sequence
  Description of Artificial Sequence: Synthetic oligonucleotide
ctgacctatgacttctgggaat

SEQ ID NO: 6221 - DNA, 23 bp, Artificial Sequence
  Description of Artificial Sequence: Synthetic oligonucleotide
aaaaatatctgagcatatgcttc

SEQ ID NO: 6222 - DNA, 22 bp, Artificial Sequence
  Description of Artificial Sequence: Synthetic oligonucleotide
ttcgtgaaagaaaatcattttt

SEQ ID NO: 6223 - DNA, 22 bp, Artificial Sequence
  Description of Artificial Sequence: Synthetic oligonucleotide
tgtagtagttacgtgacccgaa

SEQ ID NO: 6224 - DNA, 22 bp, Artificial Sequence
  Description of Artificial Sequence: Synthetic oligonucleotide
caagagtctttgtttgcagaga

SEQ ID NO: 6225 - DNA, 21 bp, Artificial Sequence
  Description of Artificial Sequence: Synthetic oligonucleotide
ctagtcctttgagttgtgctg

SEQ ID NO: 6226 - DNA, 23 bp, Artificial Sequence
  Description of Artificial Sequence: Synthetic oligonucleotide
aaggtagattcaaatgtaggagg

SEQ ID NO: 6227 - DNA, 22 bp, Artificial Sequence
  Description of Artificial Sequence: Synthetic oligonucleotide
ctcctatcatgccacactctac

SEQ ID NO: 6228 - DNA, 24 bp, Artificial Sequence
  Description of Artificial Sequence: Synthetic oligonucleotide
aaactcagagactgagatgtagac

SEQ ID NO: 6229 - DNA, 22 bp, Artificial Sequence
  Description of Artificial Sequence: Synthetic oligonucleotide
cctaattagagatggtaggggt

SEQ ID NO: 6230 - DNA, 21 bp, Artificial Sequence
  Description of Artificial Sequence: Synthetic oligonucleotide
gcctctatctgttttcctctg

SEQ ID NO: 6231 - DNA, 22 bp, Artificial Sequence
  Description of Artificial Sequence: Synthetic oligonucleotide
aagaaagcactgcagttactca

SEQ ID NO: 6232 - DNA, 23 bp, Artificial Sequence
  Description of Artificial Sequence: Synthetic oligonucleotide
aacataaccatgaaccaactaat

SEQ ID NO: 6233 - DNA, 22 bp, Artificial Sequence
  Description of Artificial Sequence: Synthetic oligonucleotide
gttctataaatcctcttcccca

SEQ ID NO: 6234 - DNA, 23 bp, Artificial Sequence
  Description of Artificial Sequence: Synthetic oligonucleotide
ttttgacaccacattcaatgtat

SEQ ID NO: 6235 - DNA, 22 bp, Artificial Sequence
  Description of Artificial Sequence: Synthetic oligonucleotide
tctctatgcagatgcaagagac

SEQ ID NO: 6236 - DNA, 22 bp, Artificial Sequence
  Description of Artificial Sequence: Synthetic oligonucleotide
atgaatggagagagaaaaccag

SEQ ID NO: 6237 - DNA, 25 bp, Artificial Sequence
  Description of Artificial Sequence: Synthetic oligonucleotide
ttttctctttctatcaattcaagtc

SEQ ID NO: 6238 - DNA, 21 bp, Artificial Sequence
  Description of Artificial Sequence: Synthetic oligonucleotide
ccaaagtgtcaggtaacacag

SEQ ID NO: 6239 - DNA, 21 bp, Artificial Sequence
  Description of Artificial Sequence: Synthetic oligonucleotide
acccactactgctgctacatt

SEQ ID NO: 6240 - DNA, 22 bp, Artificial Sequence
  Description of Artificial Sequence: Synthetic oligonucleotide
atggatctattctttttcctgg

SEQ ID NO: 6241 - DNA, 21 bp, Artificial Sequence
  Description of Artificial Sequence: Synthetic oligonucleotide
atgtatttcttcctgggaaac

SEQ ID NO: 6242 - DNA, 22 bp, Artificial Sequence
  Description of Artificial Sequence: Synthetic oligonucleotide
gctttggctacaaataggtcat

SEQ ID NO: 6243 - DNA, 24 bp, Artificial Sequence
  Description of Artificial Sequence: Synthetic oligonucleotide
tatagggttaaatgagagaatgga

SEQ ID NO: 6244 - DNA, 22 bp, Artificial Sequence
  Description of Artificial Sequence: Synthetic oligonucleotide
cacctggaacagtcttgttaaa

SEQ ID NO: 6245 - DNA, 21 bp, Artificial Sequence
  Description of Artificial Sequence: Synthetic oligonucleotide
cacacaaaacagaggaacttc

SEQ ID NO: 6246 - DNA, 22 bp, Artificial Sequence
  Description of Artificial Sequence: Synthetic oligonucleotide
gaactttgtggatgacatacca

SEQ ID NO: 6247 - DNA, 24 bp, Artificial Sequence
  Description of Artificial Sequence: Synthetic oligonucleotide
attacctgactttagagctttttt

SEQ ID NO: 6248 - DNA, 25 bp, Artificial Sequence
  Description of Artificial Sequence: Synthetic oligonucleotide
caatgtcccctagttaatatattct

SEQ ID NO: 6249 - DNA, 22 bp, Artificial Sequence
  Description of Artificial Sequence: Synthetic oligonucleotide
ccctacactttgaactcatttc

SEQ ID NO: 6250 - DNA, 21 bp, Artificial Sequence
  Description of Artificial Sequence: Synthetic oligonucleotide
aagagaagaatgacagcaagc

SEQ ID NO: 6251 - DNA, 22 bp, Artificial Sequence
  Description of Artificial Sequence: Synthetic oligonucleotide
ggggaaagcctagactaagatt

SEQ ID NO: 6252 - DNA, 24 bp, Artificial Sequence
  Description of Artificial Sequence: Synthetic oligonucleotide
tatgtcttgtgactatgatttgtg

SEQ ID NO: 6253 - DNA, 23 bp, Artificial Sequence
  Description of Artificial Sequence: Synthetic oligonucleotide
atctgaaattctggaggtatcag

SEQ ID NO: 6254 - DNA, 21 bp, Artificial Sequence
  Description of Artificial Sequence: Synthetic oligonucleotide
atctcttgtagctcaggttcc

SEQ ID NO: 6255 - DNA, 21 bp, Artificial Sequence
  Description of Artificial Sequence: Synthetic oligonucleotide
agccagagaagatgatctgaa

SEQ ID NO: 6256 - DNA, 22 bp, Artificial Sequence
  Description of Artificial Sequence: Synthetic oligonucleotide
ctggtaattttggcatgtgtta

SEQ ID NO: 6257 - DNA, 24 bp, Artificial Sequence
  Description of Artificial Sequence: Synthetic oligonucleotide
tttttctacctttttctattcatg

SEQ ID NO: 6258 - DNA, 21 bp, Artificial Sequence
  Description of Artificial Sequence: Synthetic oligonucleotide
tcattctccagaacctctgag

SEQ ID NO: 6259 - DNA, 21 bp, Artificial Sequence
  Description of Artificial Sequence: Synthetic oligonucleotide
ctgctcagcaataagtgactc

SEQ ID NO: 6260 - DNA, 21 bp, Artificial Sequence
  Description of Artificial Sequence: Synthetic oligonucleotide
tctccttctcattcttaaggc

SEQ ID NO: 6261 - DNA, 23 bp, Artificial Sequence
  Description of Artificial Sequence: Synthetic oligonucleotide
actgtcaccaaacaggtactgat

SEQ ID NO: 6262 - DNA, 24 bp, Artificial Sequence
  Description of Artificial Sequence: Synthetic oligonucleotide
ttttagtagcaagaatgtagacca

SEQ ID NO: 6263 - DNA, 24 bp, Artificial Sequence
  Description of Artificial Sequence: Synthetic oligonucleotide
ctaaacaagcagttattcttcatc

SEQ ID NO: 6264 - DNA, 21 bp, Artificial Sequence
  Description of Artificial Sequence: Synthetic oligonucleotide
ctactctgaagactgaggcag

SEQ ID NO: 6265 - DNA, 22 bp, Artificial Sequence
  Description of Artificial Sequence: Synthetic oligonucleotide
ctggacacacatgttcttccta

SEQ ID NO: 6266 - DNA, 21 bp, Artificial Sequence
  Description of Artificial Sequence: Synthetic oligonucleotide
gactccttttgtgaaaagcag

SEQ ID NO: 6267 - DNA, 24 bp, Artificial Sequence
  Description of Artificial Sequence: Synthetic oligonucleotide
tacgatttcagaactattgtgaat

SEQ ID NO: 6268 - DNA, 23 bp, Artificial Sequence
  Description of Artificial Sequence: Synthetic oligonucleotide
cgagattataaagcgttttctta

SEQ ID NO: 6269 - DNA, 22 bp, Artificial Sequence
  Description of Artificial Sequence: Synthetic oligonucleotide
gtttgtcactggccattctaat

SEQ ID NO: 6270 - DNA, 25 bp, Artificial Sequence
  Description of Artificial Sequence: Synthetic oligonucleotide
ttcttaggtcatttaacataatccc

SEQ ID NO: 6271 - DNA, 22 bp, Artificial Sequence
  Description of Artificial Sequence: Synthetic oligonucleotide
ctcctttacacttctactcccc

SEQ ID NO: 6272 - DNA, 22 bp, Artificial Sequence
  Description of Artificial Sequence: Synthetic oligonucleotide
ttactgacaaagcagaatggaa

SEQ ID NO: 6273 - DNA, 21 bp, Artificial Sequence
  Description of Artificial Sequence: Synthetic oligonucleotide
atctcagtccatacctccttc

SEQ ID NO: 6274 - DNA, 23 bp, Artificial Sequence
  Description of Artificial Sequence: Synthetic oligonucleotide
cctacttgcttctatcttcagaa

SEQ ID NO: 6275 - DNA, 21 bp, Artificial Sequence
  Description of Artificial Sequence: Synthetic oligonucleotide
tagaaactctggggtcatgaa

SEQ ID NO: 6276 - DNA, 21 bp, Artificial Sequence
  Description of Artificial Sequence: Synthetic oligonucleotide
gtctaggcttcaaatcaccct

SEQ ID NO: 6277 - DNA, 23 bp, Artificial Sequence
  Description of Artificial Sequence: Synthetic oligonucleotide
gtagctgtttaagaaattgccat

SEQ ID NO: 6278 - DNA, 21 bp, Artificial Sequence
  Description of Artificial Sequence: Synthetic oligonucleotide
cacagcaagaacacaagtcag

SEQ ID NO: 6279 - DNA, 21 bp, Artificial Sequence
  Description of Artificial Sequence: Synthetic oligonucleotide
cctttgtagtcccatcctctt

SEQ ID NO: 6280 - DNA, 21 bp, Artificial Sequence
  Description of Artificial Sequence: Synthetic oligonucleotide
gtttcaaacattcaggctcac

SEQ ID NO: 6281 - DNA, 22 bp, Artificial Sequence
  Description of Artificial Sequence: Synthetic oligonucleotide
taaatactcaacagggagcaga

SEQ ID NO: 6282 - DNA, 23 bp, Artificial Sequence
  Description of Artificial Sequence: Synthetic oligonucleotide
aggatgtatttgagttccgttat

SEQ ID NO: 6283 - DNA, 22 bp, Artificial Sequence
  Description of Artificial Sequence: Synthetic oligonucleotide
aatcagttccagtgctcttcat

SEQ ID NO: 6284 - DNA, 21 bp, Artificial Sequence
  Description of Artificial Sequence: Synthetic oligonucleotide
ctctctagtggggacactcct

SEQ ID NO: 6285 - DNA, 23 bp, Artificial Sequence
  Description of Artificial Sequence: Synthetic oligonucleotide
gtctcctcttttatcatcctcaa

SEQ ID NO: 6286 - DNA, 23 bp, Artificial Sequence
  Description of Artificial Sequence: Synthetic oligonucleotide
gtttgctcactttgactaccata

SEQ ID NO: 6287 - DNA, 23 bp, Artificial Sequence
  Description of Artificial Sequence: Synthetic oligonucleotide
tagtttgcctcagggctattata

SEQ ID NO: 6288 - DNA, 24 bp, Artificial Sequence
  Description of Artificial Sequence: Synthetic oligonucleotide
tgggtttataagtatgggtctagt

SEQ ID NO: 6289 - DNA, 26 bp, Artificial Sequence
  Description of Artificial Sequence: Synthetic oligonucleotide
gaatatcatcaatttatggaatactg

SEQ ID NO: 6290 - DNA, 23 bp, Artificial Sequence
  Description of Artificial Sequence: Synthetic oligonucleotide
gaattccacattatgattatgcc

SEQ ID NO: 6291 - DNA, 25 bp, Artificial Sequence
  Description of Artificial Sequence: Synthetic oligonucleotide
agtaaaaactcagataaacaacacc

SEQ ID NO: 6292 - DNA, 21 bp, Artificial Sequence
  Description of Artificial Sequence: Synthetic oligonucleotide
atactggtctcctccagaacc

SEQ ID NO: 6293 - DNA, 25 bp, Artificial Sequence
  Description of Artificial Sequence: Synthetic oligonucleotide
gatacagcctagaaaagatatagcc

SEQ ID NO: 6294 - DNA, 25 bp, Artificial Sequence
  Description of Artificial Sequence: Synthetic oligonucleotide
gattagaacaattctttattcacca

SEQ ID NO: 6295 - DNA, 21 bp, Artificial Sequence
  Description of Artificial Sequence: Synthetic oligonucleotide
tatggaggttctgcaaaaatt

SEQ ID NO: 6296 - DNA, 22 bp, Artificial Sequence
  Description of Artificial Sequence: Synthetic oligonucleotide
tttcagctgtagcctcttagtt

SEQ ID NO: 6297 - DNA, 22 bp, Artificial Sequence
  Description of Artificial Sequence: Synthetic oligonucleotide
aatttcttcagaagcatccttg

SEQ ID NO: 6298 - DNA, 22 bp, Artificial Sequence
  Description of Artificial Sequence: Synthetic oligonucleotide
tctagtgcgtaacagtctaggg

SEQ ID NO: 6299 - DNA, 24 bp, Artificial Sequence
  Description of Artificial Sequence: Synthetic oligonucleotide
ttgatcaaagttgtatctacagaa

SEQ ID NO: 6300 - DNA, 22 bp, Artificial Sequence
  Description of Artificial Sequence: Synthetic oligonucleotide
ctctccatctgtgcagtacttc

SEQ ID NO: 6301 - DNA, 23 bp, Artificial Sequence
  Description of Artificial Sequence: Synthetic oligonucleotide
ataactttcttgaatgaccatgt

SEQ ID NO: 6302 - DNA, 22 bp, Artificial Sequence
  Description of Artificial Sequence: Synthetic oligonucleotide
tcacaatttattggagaatgga

SEQ ID NO: 6303 - DNA, 21 bp, Artificial Sequence
  Description of Artificial Sequence: Synthetic oligonucleotide
tctccattcaacactgaggac

SEQ ID NO: 6304 - DNA, 22 bp, Artificial Sequence
  Description of Artificial Sequence: Synthetic oligonucleotide
ccatgtttagattctgagatgg

SEQ ID NO: 6305 - DNA, 21 bp, Artificial Sequence
  Description of Artificial Sequence: Synthetic oligonucleotide
ggatagaaagaggatgaggag

SEQ ID NO: 6306 - DNA, 23 bp, Artificial Sequence
  Description of Artificial Sequence: Synthetic oligonucleotide
ttgtctcttactacccgattcta

SEQ ID NO: 6307 - DNA, 26 bp, Artificial Sequence
  Description of Artificial Sequence: Synthetic oligonucleotide
agattctcattatctttttacacagc

SEQ ID NO: 6308 - DNA, 21 bp, Artificial Sequence
  Description of Artificial Sequence: Synthetic oligonucleotide
tacagcaggaaagcagagtgt

SEQ ID NO: 6309 - DNA, 26 bp, Artificial Sequence
  Description of Artificial Sequence: Synthetic oligonucleotide
tattctgaaagaaataattttgactc

SEQ ID NO: 6310 - DNA, 23 bp, Artificial Sequence
  Description of Artificial Sequence: Synthetic oligonucleotide
tacatgatcatttaacaccaagg

SEQ ID NO: 6311 - DNA, 25 bp, Artificial Sequence
  Description of Artificial Sequence: Synthetic oligonucleotide
acatatactgtacttggaatgaaaa

SEQ ID NO: 6312 - DNA, 24 bp, Artificial Sequence
  Description of Artificial Sequence: Synthetic oligonucleotide
gatgttcagaaaaaaggtatagtt

SEQ ID NO: 6313 - DNA, 24 bp, Artificial Sequence
  Description of Artificial Sequence: Synthetic oligonucleotide
taaaaatgttttgagtatgcattg

SEQ ID NO: 6314 - DNA, 23 bp, Artificial Sequence
  Description of Artificial Sequence: Synthetic oligonucleotide
gatgcatgaaacaaataaacaag

SEQ ID NO: 6315 - DNA, 24 bp, Artificial Sequence
  Description of Artificial Sequence: Synthetic oligonucleotide
gacataaactatgtggtatggtga

SEQ ID NO: 6316 - DNA, 21 bp, Artificial Sequence
  Description of Artificial Sequence: Synthetic oligonucleotide
gagacagggaaaattgagagc

SEQ ID NO: 6317 - DNA, 25 bp, Artificial Sequence
  Description of Artificial Sequence: Synthetic oligonucleotide
gcttctacagtttccttctaatatc

SEQ ID NO: 6318 - DNA, 21 bp, Artificial Sequence
  Description of Artificial Sequence: Synthetic oligonucleotide
tgtggagacaagaaccttttg

SEQ ID NO: 6319 - DNA, 21 bp, Artificial Sequence
  Description of Artificial Sequence: Synthetic oligonucleotide
cgagatcgcctagtatgttct

SEQ ID NO: 6320 - DNA, 24 bp, Artificial Sequence
  Description of Artificial Sequence: Synthetic oligonucleotide
agtttgtcctacaaatagacttgc

SEQ ID NO: 6321 - DNA, 21 bp, Artificial Sequence
  Description of Artificial Sequence: Synthetic oligonucleotide
taagcaaaatgggtggagtta

SEQ ID NO: 6322 - DNA, 22 bp, Artificial Sequence
  Description of Artificial Sequence: Synthetic oligonucleotide
taagtacttctgctacagggct

SEQ ID NO: 6323 - DNA, 24 bp, Artificial Sequence
  Description of Artificial Sequence: Synthetic oligonucleotide
tcctgaaatggcttatatttaagt

SEQ ID NO: 6324 - DNA, 24 bp, Artificial Sequence
  Description of Artificial Sequence: Synthetic oligonucleotide
tatacgccatgtactgttcatatc

SEQ ID NO: 6325 - DNA, 21 bp, Artificial Sequence
  Description of Artificial Sequence: Synthetic oligonucleotide
tcctattcaaccctgagagct

SEQ ID NO: 6326 - DNA, 23 bp, Artificial Sequence
  Description of Artificial Sequence: Synthetic oligonucleotide
caaactcagtcagaaagctagtg

SEQ ID NO: 6327 - DNA, 20 bp, Artificial Sequence
  Description of Artificial Sequence: Synthetic oligonucleotide
ccaaaggaaatggagaaaag

SEQ ID NO: 6328 - DNA, 23 bp, Artificial Sequence
  Description of Artificial Sequence: Synthetic oligonucleotide
ttacaatgtccttcagctatgtt

SEQ ID NO: 6329 - DNA, 21 bp, Artificial Sequence
  Description of Artificial Sequence: Synthetic oligonucleotide
tgcctttacggatttgtctat

SEQ ID NO: 6330 - DNA, 23 bp, Artificial Sequence
  Description of Artificial Sequence: Synthetic oligonucleotide
tcccaaacaatactgttttacaa

SEQ ID NO: 6331 - DNA, 21 bp, Artificial Sequence
  Description of Artificial Sequence: Synthetic oligonucleotide
cgttcccttaccctgacatat

SEQ ID NO: 6332 - DNA, 24 bp, Artificial Sequence
  Description of Artificial Sequence: Synthetic oligonucleotide
gttttaactgaagtctccatttta

SEQ ID NO: 6333 - DNA, 21 bp, Artificial Sequence
  Description of Artificial Sequence: Synthetic oligonucleotide
ctgaaagagctccctatggac

SEQ ID NO: 6334 - DNA, 21 bp, Artificial Sequence
  Description of Artificial Sequence: Synthetic oligonucleotide
tcatcctggactctaaaatgg

SEQ ID NO: 6335 - DNA, 20 bp, Artificial Sequence
  Description of Artificial Sequence: Synthetic oligonucleotide
caactctccatataccccag

SEQ ID NO: 6336 - DNA, 20 bp, Artificial Sequence
  Description of Artificial Sequence: Synthetic oligonucleotide
gtcctacagacagggaaatg

SEQ ID NO: 6337 - DNA, 21 bp, Artificial Sequence
  Description of Artificial Sequence: Synthetic oligonucleotide
ttagaagcaagtcacagatcc

SEQ ID NO: 6338 - DNA, 20 bp, Artificial Sequence
  Description of Artificial Sequence: Synthetic oligonucleotide
atgcctgttctcacctaggt

SEQ ID NO: 6339 - DNA, 24 bp, Artificial Sequence
  Description of Artificial Sequence: Synthetic oligonucleotide
tagaagaaagaacttcatagctca

SEQ ID NO: 6340 - DNA, 20 bp, Artificial Sequence
  Description of Artificial Sequence: Synthetic oligonucleotide
gaaaaagcaagtcatgcatt

SEQ ID NO: 6341 - DNA, 20 bp, Artificial Sequence
  Description of Artificial Sequence: Synthetic oligonucleotide
aggaaatgatgttcggaaag

SEQ ID NO: 6342 - DNA, 22 bp, Artificial Sequence
  Description of Artificial Sequence: Synthetic oligonucleotide
catatgaatgcaaccttgtaca

SEQ ID NO: 6343 - DNA, 22 bp, Artificial Sequence
  Description of Artificial Sequence: Synthetic oligonucleotide
tcactttccattttttcctttt

SEQ ID NO: 6344 - DNA, 21 bp, Artificial Sequence
  Description of Artificial Sequence: Synthetic oligonucleotide
tccttagggtactcaggtggt

SEQ ID NO: 6345 - DNA, 22 bp, Artificial Sequence
  Description of Artificial Sequence: Synthetic oligonucleotide
atcttctcatggtaattgctga

SEQ ID NO: 6346 - DNA, 26 bp, Artificial Sequence
  Description of Artificial Sequence: Synthetic oligonucleotide
tgccactaaataaaaagtattaaacc

SEQ ID NO: 6347 - DNA, 26 bp, Artificial Sequence
  Description of Artificial Sequence: Synthetic oligonucleotide
aattgagtatcatttctttacttttg

SEQ ID NO: 6348 - DNA, 21 bp, Artificial Sequence
  Description of Artificial Sequence: Synthetic oligonucleotide
ctgcattataagggtgaggct

SEQ ID NO: 6349 - DNA, 21 bp, Artificial Sequence
  Description of Artificial Sequence: Synthetic oligonucleotide
gcagctaccaagatttttggt

SEQ ID NO: 6350 - DNA, 21 bp, Artificial Sequence
  Description of Artificial Sequence: Synthetic oligonucleotide
ctttaaaaacggctgtcaggt

SEQ ID NO: 6351 - DNA, 22 bp, Artificial Sequence
  Description of Artificial Sequence: Synthetic oligonucleotide
agagaaactgaggtgaggtcag

SEQ ID NO: 6352 - DNA, 20 bp, Artificial Sequence
  Description of Artificial Sequence: Synthetic oligonucleotide
agtgagcttggaagcagatt

SEQ ID NO: 6353 - DNA, 21 bp, Artificial Sequence
  Description of Artificial Sequence: Synthetic oligonucleotide
taatagccttggcagtaaacg

SEQ ID NO: 6354 - DNA, 20 bp, Artificial Sequence
  Description of Artificial Sequence: Synthetic oligonucleotide
actacgttttctccctcagc

SEQ ID NO: 6355 - DNA, 20 bp, Artificial Sequence
  Description of Artificial Sequence: Synthetic oligonucleotide
gatcagctacatctgggctt

SEQ ID NO: 6356 - DNA, 20 bp, Artificial Sequence
  Description of Artificial Sequence: Synthetic oligonucleotide
ggatgtgaaaacttggaatc

SEQ ID NO: 6357 - DNA, 24 bp, Artificial Sequence
  Description of Artificial Sequence: Synthetic oligonucleotide
aatccactatctctctcattcttc

SEQ ID NO: 6358 - DNA, 23 bp, Artificial Sequence
  Description of Artificial Sequence: Synthetic oligonucleotide
tgaaggttcttcaaaaagttaaa

SEQ ID NO: 6359 - DNA, 26 bp, Artificial Sequence
  Description of Artificial Sequence: Synthetic oligonucleotide
actataacagaaagagaagagagaga

SEQ ID NO: 6360 - DNA, 22 bp, Artificial Sequence
  Description of Artificial Sequence: Synthetic oligonucleotide
atccccataatcaaagtattcc

SEQ ID NO: 6361 - DNA, 21 bp, Artificial Sequence
  Description of Artificial Sequence: Synthetic oligonucleotide
ttatccccacctctgatgatt

SEQ ID NO: 6362 - DNA, 22 bp, Artificial Sequence
  Description of Artificial Sequence: Synthetic oligonucleotide
acttcgtactttgacacacacc

SEQ ID NO: 6363 - DNA, 24 bp, Artificial Sequence
  Description of Artificial Sequence: Synthetic oligonucleotide
acagtgaggtttagtaacaagtca

SEQ ID NO: 6364 - DNA, 21 bp, Artificial Sequence
  Description of Artificial Sequence: Synthetic oligonucleotide
tggtgctggattttctcatag

SEQ ID NO: 6365 - DNA, 21 bp, Artificial Sequence
  Description of Artificial Sequence: Synthetic oligonucleotide
ctcactgtctgcagacatctg

SEQ ID NO: 6366 - DNA, 23 bp, Artificial Sequence
  Description of Artificial Sequence: Synthetic oligonucleotide
tctgaagaatattgagctctgaa

SEQ ID NO: 6367 - DNA, 21 bp, Artificial Sequence
  Description of Artificial Sequence: Synthetic oligonucleotide
gcgaaccttgttctatttgct

SEQ ID NO: 6368 - DNA, 22 bp, Artificial Sequence
  Description of Artificial Sequence: Synthetic oligonucleotide
cttggagaaaactatggaaaac

SEQ ID NO: 6369 - DNA, 22 bp, Artificial Sequence
  Description of Artificial Sequence: Synthetic oligonucleotide
gtggtcctttttgcatgtttta

SEQ ID NO: 6370 - DNA, 23 bp, Artificial Sequence
  Description of Artificial Sequence: Synthetic oligonucleotide
ttcctgtagcgaaagggtagata

SEQ ID NO: 6371 - DNA, 20 bp, Artificial Sequence
  Description of Artificial Sequence: Synthetic oligonucleotide
ttacgtcatgcaaatgaggt

SEQ ID NO: 6372 - DNA, 26 bp, Artificial Sequence
  Description of Artificial Sequence: Synthetic oligonucleotide
ctgtatttctacaatagcactatcac

SEQ ID NO: 6373 - DNA, 20 bp, Artificial Sequence
  Description of Artificial Sequence: Synthetic oligonucleotide
agaccagcttgtgagacatg

SEQ ID NO: 6374 - DNA, 25 bp, Artificial Sequence
  Description of Artificial Sequence: Synthetic oligonucleotide
cagttagttgttaattaactggaaa

SEQ ID NO: 6375 - DNA, 21 bp, Artificial Sequence
  Description of Artificial Sequence: Synthetic oligonucleotide
aatgcaagggaataacacaga

SEQ ID NO: 6376 - DNA, 20 bp, Artificial Sequence
  Description of Artificial Sequence: Synthetic oligonucleotide
ctctccttcctcacaagacc

SEQ ID NO: 6377 - DNA, 21 bp, Artificial Sequence
  Description of Artificial Sequence: Synthetic oligonucleotide
ccgcccattctactactcaac

SEQ ID NO: 6378 - DNA, 21 bp, Artificial Sequence
  Description of Artificial Sequence: Synthetic oligonucleotide
cagaaacttctggaagccact

SEQ ID NO: 6379 - DNA, 20 bp, Artificial Sequence
  Description of Artificial Sequence: Synthetic oligonucleotide
ctgactgttttgcacacttc

SEQ ID NO: 6380 - DNA, 26 bp, Artificial Sequence
  Description of Artificial Sequence: Synthetic oligonucleotide
tccaaatatatgtatatcttttcacc

SEQ ID NO: 6381 - DNA, 20 bp, Artificial Sequence
  Description of Artificial Sequence: Synthetic oligonucleotide
tgatcagctgtaggcatcac

SEQ ID NO: 6382 - DNA, 22 bp, Artificial Sequence
  Description of Artificial Sequence: Synthetic oligonucleotide
aacatgggaacagaaaacctaa

SEQ ID NO: 6383 - DNA, 26 bp, Artificial Sequence
  Description of Artificial Sequence: Synthetic oligonucleotide
aatcagagatctttattttattcagt

SEQ ID NO: 6384 - DNA, 20 bp, Artificial Sequence
  Description of Artificial Sequence: Synthetic oligonucleotide
cccattgcgtaaaaacactt

SEQ ID NO: 6385 - DNA, 20 bp, Artificial Sequence
  Description of Artificial Sequence: Synthetic oligonucleotide
ttcatgatgaggaaaaaccc

SEQ ID NO: 6386 - DNA, 26 bp, Artificial Sequence
  Description of Artificial Sequence: Synthetic oligonucleotide
tctatatgtgaacacagtttaaaagc

SEQ ID NO: 6387 - DNA, 24 bp, Artificial Sequence
  Description of Artificial Sequence: Synthetic oligonucleotide
cctaagtcaaaccatcttaagtca

SEQ ID NO: 6388 - DNA, 24 bp, Artificial Sequence
  Description of Artificial Sequence: Synthetic oligonucleotide
cagaaattgtttactccaatctag

SEQ ID NO: 6389 - DNA, 23 bp, Artificial Sequence
  Description of Artificial Sequence: Synthetic oligonucleotide
acagagaaaacataacccagaag

SEQ ID NO: 6390 - DNA, 21 bp, Artificial Sequence
  Description of Artificial Sequence: Synthetic oligonucleotide
tagagcctttgctgatccttt

SEQ ID NO: 6391 - DNA, 22 bp, Artificial Sequence
  Description of Artificial Sequence: Synthetic oligonucleotide
tttgggggagatattaggctta

SEQ ID NO: 6392 - DNA, 21 bp, Artificial Sequence
  Description of Artificial Sequence: Synthetic oligonucleotide
ccaatgggaaccttagtctct

SEQ ID NO: 6393 - DNA, 23 bp, Artificial Sequence
  Description of Artificial Sequence: Synthetic oligonucleotide
tggtaaacatcattaagcaccta

SEQ ID NO: 6394 - DNA, 21 bp, Artificial Sequence
  Description of Artificial Sequence: Synthetic oligonucleotide
cataggacccagagtgaggag

SEQ ID NO: 6395 - DNA, 20 bp, Artificial Sequence
  Description of Artificial Sequence: Synthetic oligonucleotide
agttggatttccccataagg

SEQ ID NO: 6396 - DNA, 27 bp, Artificial Sequence
  Description of Artificial Sequence: Synthetic oligonucleotide
agaattgagatagtaaggataatttca

SEQ ID NO: 6397 - DNA, 23 bp, Artificial Sequence
  Description of Artificial Sequence: Synthetic oligonucleotide
atatttctgaatggagtatgagg

SEQ ID NO: 6398 - DNA, 23 bp, Artificial Sequence
  Description of Artificial Sequence: Synthetic oligonucleotide
aacctactaattgtcactgcatt

SEQ ID NO: 6399 - DNA, 21 bp, Artificial Sequence
  Description of Artificial Sequence: Synthetic oligonucleotide
agaactatcctgtggtcctgc

SEQ ID NO: 6400 - DNA, 21 bp, Artificial Sequence
  Description of Artificial Sequence: Synthetic oligonucleotide
ctttttggtggtcttggtctt

SEQ ID NO: 6401 - DNA, 20 bp, Artificial Sequence
  Description of Artificial Sequence: Synthetic oligonucleotide
aaaagtggctgggagaagat

SEQ ID NO: 6402 - DNA, 20 bp, Artificial Sequence
  Description of Artificial Sequence: Synthetic oligonucleotide
ggttcctccatgactctttc

SEQ ID NO: 6403 - DNA, 24 bp, Artificial Sequence
  Description of Artificial Sequence: Synthetic oligonucleotide
caatcataattaccctaactgtgt

SEQ ID NO: 6404 - DNA, 20 bp, Artificial Sequence
  Description of Artificial Sequence: Synthetic oligonucleotide
aacaaggaaagcagatgtgg

SEQ ID NO: 6405 - DNA, 25 bp, Artificial Sequence
  Description of Artificial Sequence: Synthetic oligonucleotide
gactcagatataaaaaggagaatct

SEQ ID NO: 6406 - DNA, 24 bp, Artificial Sequence
  Description of Artificial Sequence: Synthetic oligonucleotide
tgaagaagtgaagaatataacctg

SEQ ID NO: 6407 - DNA, 24 bp, Artificial Sequence
  Description of Artificial Sequence: Synthetic oligonucleotide
gaaagtatattagctttgggagtg

SEQ ID NO: 6408 - DNA, 20 bp, Artificial Sequence
  Description of Artificial Sequence: Synthetic oligonucleotide
tcctcagacagcacactctc

SEQ ID NO: 6409 - DNA, 26 bp, Artificial Sequence
  Description of Artificial Sequence: Synthetic oligonucleotide
cttacttccataaaagatataaaacc

SEQ ID NO: 6410 - DNA, 26 bp, Artificial Sequence
  Description of Artificial Sequence: Synthetic oligonucleotide
ttttaaaactctgtaactatttcgtt

SEQ ID NO: 6411 - DNA, 22 bp, Artificial Sequence
  Description of Artificial Sequence: Synthetic oligonucleotide
tttcctattgatgtacatgtgg

SEQ ID NO: 6412 - DNA, 20 bp, Artificial Sequence
  Description of Artificial Sequence: Synthetic oligonucleotide
tcgtcctcttctccttcaac

SEQ ID NO: 6413 - DNA, 20 bp, Artificial Sequence
  Description of Artificial Sequence: Synthetic oligonucleotide
ttggggagtcagctctgtac

SEQ ID NO: 6414 - DNA, 24 bp, Artificial Sequence
  Description of Artificial Sequence: Synthetic oligonucleotide
atttacacatgcatacgtatgttt

SEQ ID NO: 6415 - DNA, 21 bp, Artificial Sequence
  Description of Artificial Sequence: Synthetic oligonucleotide
ctatagccatcacagcagcac

SEQ ID NO: 6416 - DNA, 21 bp, Artificial Sequence
  Description of Artificial Sequence: Synthetic oligonucleotide
tgctcattctcctgaccatag

SEQ ID NO: 6417 - DNA, 24 bp, Artificial Sequence
  Description of Artificial Sequence: Synthetic oligonucleotide
ggatgtctgttctaaaagagagtg

SEQ ID NO: 6418 - DNA, 24 bp, Artificial Sequence
  Description of Artificial Sequence: Synthetic oligonucleotide
aaccctaatttcatgagacaatat

SEQ ID NO: 6419 - DNA, 20 bp, Artificial Sequence
  Description of Artificial Sequence: Synthetic oligonucleotide
aggacactccagcagcatac

SEQ ID NO: 6420 - DNA, 20 bp, Artificial Sequence
  Description of Artificial Sequence: Synthetic oligonucleotide
tttgcacatgtgccatattc

SEQ ID NO: 6421 - DNA, 20 bp, Artificial Sequence
  Description of Artificial Sequence: Synthetic oligonucleotide
gcatgagaaggaaagcaaga

SEQ ID NO: 6422 - DNA, 25 bp, Artificial Sequence
  Description of Artificial Sequence: Synthetic oligonucleotide
gctgttagtaagttgtctttaatgg

SEQ ID NO: 6423 - DNA, 26 bp, Artificial Sequence
  Description of Artificial Sequence: Synthetic oligonucleotide
aagtaaaacaatttacagatgttaga

SEQ ID NO: 6424 - DNA, 21 bp, Artificial Sequence
  Description of Artificial Sequence: Synthetic oligonucleotide
aaagaggtggctgaaggaaat

SEQ ID NO: 6425 - DNA, 21 bp, Artificial Sequence
  Description of Artificial Sequence: Synthetic oligonucleotide
ttgtggtctcttccactttct

SEQ ID NO: 6426 - DNA, 25 bp, Artificial Sequence
  Description of Artificial Sequence: Synthetic oligonucleotide
gtaatatgcgtatgtttttgtatgt

SEQ ID NO: 6427 - DNA, 23 bp, Artificial Sequence
  Description of Artificial Sequence: Synthetic oligonucleotide
tggagagagtatagtcgtttctt

SEQ ID NO: 6428 - DNA, 20 bp, Artificial Sequence
  Description of Artificial Sequence: Synthetic oligonucleotide
gcttctttgtttgaggggat

SEQ ID NO: 6429 - DNA, 20 bp, Artificial Sequence
  Description of Artificial Sequence: Synthetic oligonucleotide
ttcttcagaggacttcccct

SEQ ID NO: 6430 - DNA, 20 bp, Artificial Sequence
  Description of Artificial Sequence: Synthetic oligonucleotide
acaaaaataagcaatgggca

SEQ ID NO: 6431 - DNA, 21 bp, Artificial Sequence
  Description of Artificial Sequence: Synthetic oligonucleotide
cttcatcacctcctcttctcc

SEQ ID NO: 6432 - DNA, 21 bp, Artificial Sequence
  Description of Artificial Sequence: Synthetic oligonucleotide
gtcaagttgggcaaaaattag

SEQ ID NO: 6433 - DNA, 24 bp, Artificial Sequence
  Description of Artificial Sequence: Synthetic oligonucleotide
ggataatgcctagtaggtaattaa

SEQ ID NO: 6434 - DNA, 22 bp, Artificial Sequence
  Description of Artificial Sequence: Synthetic oligonucleotide
atcctgcaaaagaggtacaaag

SEQ ID NO: 6435 - DNA, 24 bp, Artificial Sequence
  Description of Artificial Sequence: Synthetic oligonucleotide
ctaataggaggaacaagaaaaaaa

SEQ ID NO: 6436 - DNA, 20 bp, Artificial Sequence
  Description of Artificial Sequence: Synthetic oligonucleotide
ccaccacaaacctgtagagg

SEQ ID NO: 6437 - DNA, 20 bp, Artificial Sequence
  Description of Artificial Sequence: Synthetic oligonucleotide
catggttgcagagctaggac

SEQ ID NO: 6438 - DNA, 21 bp, Artificial Sequence
  Description of Artificial Sequence: Synthetic oligonucleotide
ggctcagtattgagaattccc

SEQ ID NO: 6439 - DNA, 19 bp, Artificial Sequence
  Description of Artificial Sequence: Synthetic oligonucleotide
cattggacacactgctgtc

SEQ ID NO: 6440 - DNA, 20 bp, Artificial Sequence
  Description of Artificial Sequence: Synthetic oligonucleotide
acagaggtgcacagctagtg

SEQ ID NO: 6441 - DNA, 20 bp, Artificial Sequence
  Description of Artificial Sequence: Synthetic oligonucleotide
actctgcagctgtggttctc

SEQ ID NO: 6442 - DNA, 21 bp, Artificial Sequence
  Description of Artificial Sequence: Synthetic oligonucleotide
gtggctctagcactgttccat

SEQ ID NO: 6443 - DNA, 27 bp, Artificial Sequence
  Description of Artificial Sequence: Synthetic oligonucleotide
cttcacacagttatgatactactaaca

SEQ ID NO: 6444 - DNA, 19 bp, Artificial Sequence
  Description of Artificial Sequence: Synthetic oligonucleotide
tgtttcctgatcctgtcct

SEQ ID NO: 6445 - DNA, 20 bp, Artificial Sequence
  Description of Artificial Sequence: Synthetic oligonucleotide
actgtggacgtcaccaaact

SEQ ID NO: 6446 - DNA, 23 bp, Artificial Sequence
  Description of Artificial Sequence: Synthetic oligonucleotide
gtctaaaagaatctgctttgttg

SEQ ID NO: 6447 - DNA, 23 bp, Artificial Sequence
  Description of Artificial Sequence: Synthetic oligonucleotide
taaggcagagtacatggtaatga

SEQ ID NO: 6448 - DNA, 19 bp, Artificial Sequence
  Description of Artificial Sequence: Synthetic oligonucleotide
gaagcaaaatcgtttttcc

SEQ ID NO: 6449 - DNA, 19 bp, Artificial Sequence
  Description of Artificial Sequence: Synthetic oligonucleotide
ggtctccctcttctatggc

SEQ ID NO: 6450 - DNA, 23 bp, Artificial Sequence
  Description of Artificial Sequence: Synthetic oligonucleotide
gtctttcaagaattttgaaagtg

SEQ ID NO: 6451 - DNA, 24 bp, Artificial Sequence
  Description of Artificial Sequence: Synthetic oligonucleotide
aaaatatttctttcactgcaattt

SEQ ID NO: 6452 - DNA, 25 bp, Artificial Sequence
  Description of Artificial Sequence: Synthetic oligonucleotide
acataccagaaaaccaagttatatg

SEQ ID NO: 6453 - DNA, 23 bp, Artificial Sequence
  Description of Artificial Sequence: Synthetic oligonucleotide
actatagccatgagaattcagtc

SEQ ID NO: 6454 - DNA, 20 bp, Artificial Sequence
  Description of Artificial Sequence: Synthetic oligonucleotide
tgccagataagtgaggctag

SEQ ID NO: 6455 - DNA, 20 bp, Artificial Sequence
  Description of Artificial Sequence: Synthetic oligonucleotide
gtggcaaaatcatccttcag

SEQ ID NO: 6456 - DNA, 19 bp, Artificial Sequence
  Description of Artificial Sequence: Synthetic oligonucleotide
tgcttcatgctggtacctt

SEQ ID NO: 6457 - DNA, 23 bp, Artificial Sequence
  Description of Artificial Sequence: Synthetic oligonucleotide
cctgattttttttgttcttcttt

SEQ ID NO: 6458 - DNA, 19 bp, Artificial Sequence
  Description of Artificial Sequence: Synthetic oligonucleotide
taactcctagtcccctggg

SEQ ID NO: 6459 - DNA, 21 bp, Artificial Sequence
  Description of Artificial Sequence: Synthetic oligonucleotide
acagggtttggccttcataat

SEQ ID NO: 6460 - DNA, 26 bp, Artificial Sequence
  Description of Artificial Sequence: Synthetic oligonucleotide
ctatctcataggtcaaagactaagtc

SEQ ID NO: 6461 - DNA, 20 bp, Artificial Sequence
  Description of Artificial Sequence: Synthetic oligonucleotide
ggccagggaaataaaagaaa

SEQ ID NO: 6462 - DNA, 25 bp, Artificial Sequence
  Description of Artificial Sequence: Synthetic oligonucleotide
atatctaacagtcccatagaagatg

SEQ ID NO: 6463 - DNA, 22 bp, Artificial Sequence
  Description of Artificial Sequence: Synthetic oligonucleotide
ctccttcaatactggggattac

SEQ ID NO: 6464 - DNA, 25 bp, Artificial Sequence
  Description of Artificial Sequence: Synthetic oligonucleotide
tacttttcctttctaggaatgtaga

SEQ ID NO: 6465 - DNA, 20 bp, Artificial Sequence
  Description of Artificial Sequence: Synthetic oligonucleotide
agagcagaggggtgagtctt

SEQ ID NO: 6466 - DNA, 23 bp, Artificial Sequence
  Description of Artificial Sequence: Synthetic oligonucleotide
ttaaggctgaataatattgcatt

SEQ ID NO: 6467 - DNA, 19 bp, Artificial Sequence
  Description of Artificial Sequence: Synthetic oligonucleotide
caagttgcactcccttctg

SEQ ID NO: 6468 - DNA, 20 bp, Artificial Sequence
  Description of Artificial Sequence: Synthetic oligonucleotide
ataggttcagatgcctgggt

SEQ ID NO: 6469 - DNA, 21 bp, Artificial Sequence
  Description of Artificial Sequence: Synthetic oligonucleotide
gttaatttattggggattgct

SEQ ID NO: 6470 - DNA, 26 bp, Artificial Sequence
  Description of Artificial Sequence: Synthetic oligonucleotide
atattatgaaattttctctcagaatt

SEQ ID NO: 6471 - DNA, 19 bp, Artificial Sequence
  Description of Artificial Sequence: Synthetic oligonucleotide
ctcacctagatggctgcag

SEQ ID NO: 6472 - DNA, 19 bp, Artificial Sequence
  Description of Artificial Sequence: Synthetic oligonucleotide
ttgtgggaatggatgaaag

SEQ ID NO: 6473 - DNA, 19 bp, Artificial Sequence
  Description of Artificial Sequence: Synthetic oligonucleotide
cctctgcagtgatcgtgtt

SEQ ID NO: 6474 - DNA, 19 bp, Artificial Sequence
  Description of Artificial Sequence: Synthetic oligonucleotide
tggtagctattacccacgc

SEQ ID NO: 6475 - DNA, 20 bp, Artificial Sequence
  Description of Artificial Sequence: Synthetic oligonucleotide
gtggaagcactcaactcagc

SEQ ID NO: 6476 - DNA, 19 bp, Artificial Sequence
  Description of Artificial Sequence: Synthetic oligonucleotide
gctttgggaaaactaccgt

SEQ ID NO: 6477 - DNA, 20 bp, Artificial Sequence
  Description of Artificial Sequence: Synthetic oligonucleotide
agtcaatccttggcctcttc

SEQ ID NO: 6478 - DNA, 19 bp, Artificial Sequence
  Description of Artificial Sequence: Synthetic oligonucleotide
tgagcaatttgtgagggag

SEQ ID NO: 6479 - DNA, 24 bp, Artificial Sequence
  Description of Artificial Sequence: Synthetic oligonucleotide
ctttgttctttttgtgtaggattg

SEQ ID NO: 6480 - DNA, 20 bp, Artificial Sequence
  Description of Artificial Sequence: Synthetic oligonucleotide
ttttcgtcagagacttcatg

SEQ ID NO: 6481 - DNA, 26 bp, Artificial Sequence
  Description of Artificial Sequence: Synthetic oligonucleotide
ttctgggaatatatattataggttct

SEQ ID NO: 6482 - DNA, 24 bp, Artificial Sequence
  Description of Artificial Sequence: Synthetic oligonucleotide
ctttagcactaggtattctggttt

SEQ ID NO: 6483 - DNA, 23 bp, Artificial Sequence
  Description of Artificial Sequence: Synthetic oligonucleotide
tcagggttcaagatatagagtca

SEQ ID NO: 6484 - DNA, 23 bp, Artificial Sequence
  Description of Artificial Sequence: Synthetic oligonucleotide
cccaggaactaagaagagtaaaa

SEQ ID NO: 6485 - DNA, 23 bp, Artificial Sequence
  Description of Artificial Sequence: Synthetic oligonucleotide
gcatagtccttcctgaaaaatat

SEQ ID NO: 6486 - DNA, 23 bp, Artificial Sequence
  Description of Artificial Sequence: Synthetic oligonucleotide
caacctgcttactttttctcttt

SEQ ID NO: 6487 - DNA, 20 bp, Artificial Sequence
  Description of Artificial Sequence: Synthetic oligonucleotide
caggccacctaagggtatag

SEQ ID NO: 6488 - DNA, 23 bp, Artificial Sequence
  Description of Artificial Sequence: Synthetic oligonucleotide
ggtttggaaattttcactacata

SEQ ID NO: 6489 - DNA, 24 bp, Artificial Sequence
  Description of Artificial Sequence: Synthetic oligonucleotide
atacctggaaaaatcctaaataaa

SEQ ID NO: 6490 - DNA, 23 bp, Artificial Sequence
  Description of Artificial Sequence: Synthetic oligonucleotide
catgtgtagacagatgtcttgaa

SEQ ID NO: 6491 - DNA, 23 bp, Artificial Sequence
  Description of Artificial Sequence: Synthetic oligonucleotide
tgctccatactctaacatctagc

SEQ ID NO: 6492 - DNA, 23 bp, Artificial Sequence
  Description of Artificial Sequence: Synthetic oligonucleotide
gagctaagtaagtaacaaaggcc

SEQ ID NO: 6493 - DNA, 23 bp, Artificial Sequence
  Description of Artificial Sequence: Synthetic oligonucleotide
gttggagaggagtaactttgtct

SEQ ID NO: 6494 - DNA, 23 bp, Artificial Sequence
  Description of Artificial Sequence: Synthetic oligonucleotide
atgcttcatgtctccaaaatata

SEQ ID NO: 6495 - DNA, 19 bp, Artificial Sequence
  Description of Artificial Sequence: Synthetic oligonucleotide
gcacaaccacgaagatgac

SEQ ID NO: 6496 - DNA, 23 bp, Artificial Sequence
  Description of Artificial Sequence: Synthetic oligonucleotide
aacaggttagattctctctttgg

SEQ ID NO: 6497 - DNA, 22 bp, Artificial Sequence
  Description of Artificial Sequence: Synthetic oligonucleotide
gctgtctcattactgagtgtgc

SEQ ID NO: 6498 - DNA, 24 bp, Artificial Sequence
  Description of Artificial Sequence: Synthetic oligonucleotide
gtaatttatgtgctcctgaaaatt

SEQ ID NO: 6499 - DNA, 23 bp, Artificial Sequence
  Description of Artificial Sequence: Synthetic oligonucleotide
accaaacttaaccaagaatcaac

SEQ ID NO: 6500 - DNA, 19 bp, Artificial Sequence
  Description of Artificial Sequence: Synthetic oligonucleotide
cctggtaggatgagtgcat

SEQ ID NO: 6501 - DNA, 23 bp, Artificial Sequence
  Description of Artificial Sequence: Synthetic oligonucleotide
tgagtggtccactgatattacat

SEQ ID NO: 6502 - DNA, 20 bp, Artificial Sequence
  Description of Artificial Sequence: Synthetic oligonucleotide
gatcctgggaactggacagt

SEQ ID NO: 6503 - DNA, 23 bp, Artificial Sequence
  Description of Artificial Sequence: Synthetic oligonucleotide
cttgaatctcttctgttttttcc

SEQ ID NO: 6504 - DNA, 25 bp, Artificial Sequence
  Description of Artificial Sequence: Synthetic oligonucleotide
ctcatttattatgtttcttattcca

SEQ ID NO: 6505 - DNA, 19 bp, Artificial Sequence
  Description of Artificial Sequence: Synthetic oligonucleotide
gcccattacatccagactg

SEQ ID NO: 6506 - DNA, 24 bp, Artificial Sequence
  Description of Artificial Sequence: Synthetic oligonucleotide
tttatattttcttgtgtgtggaaa

SEQ ID NO: 6507 - DNA, 24 bp, Artificial Sequence
  Description of Artificial Sequence: Synthetic oligonucleotide
gaatgtatctgtgtgcagacttag

SEQ ID NO: 6508 - DNA, 21 bp, Artificial Sequence
  Description of Artificial Sequence: Synthetic oligonucleotide
ctggcctcccctactcagtat

SEQ ID NO: 6509 - DNA, 23 bp, Artificial Sequence
  Description of Artificial Sequence: Synthetic oligonucleotide
aacagtgcttgtggaataaaaat

SEQ ID NO: 6510 - DNA, 23 bp, Artificial Sequence
  Description of Artificial Sequence: Synthetic oligonucleotide
ggtttctttttctggattagttt

SEQ ID NO: 6511 - DNA, 23 bp, Artificial Sequence
  Description of Artificial Sequence: Synthetic oligonucleotide
aaggagcttatgattttgtctgt

SEQ ID NO: 6512 - DNA, 23 bp, Artificial Sequence
  Description of Artificial Sequence: Synthetic oligonucleotide
agagactagaactttccaaggaa

SEQ ID NO: 6513 - DNA, 24 bp, Artificial Sequence
  Description of Artificial Sequence: Synthetic oligonucleotide
ggaaattagaatcaggaatgtagt

SEQ ID NO: 6514 - DNA, 25 bp, Artificial Sequence
  Description of Artificial Sequence: Synthetic oligonucleotide
caaaattcatatgttgaaaatctaa

SEQ ID NO: 6515 - DNA, 20 bp, Artificial Sequence
  Description of Artificial Sequence: Synthetic oligonucleotide
agaccatcatccctaggagc

SEQ ID NO: 6516 - DNA, 19 bp, Artificial Sequence
  Description of Artificial Sequence: Synthetic oligonucleotide
tgtcctgcaggtccttaca

SEQ ID NO: 6517 - DNA, 20 bp, Artificial Sequence
  Description of Artificial Sequence: Synthetic oligonucleotide
tgagggactccataaagagg

SEQ ID NO: 6518 - DNA, 22 bp, Artificial Sequence
  Description of Artificial Sequence: Synthetic oligonucleotide
cccttctcactgactagtgatc

SEQ ID NO: 6519 - DNA, 25 bp, Artificial Sequence
  Description of Artificial Sequence: Synthetic oligonucleotide
tttacacagcaacagataactaatg

SEQ ID NO: 6520 - DNA, 26 bp, Artificial Sequence
  Description of Artificial Sequence: Synthetic oligonucleotide
ataagtctttaactctctagagttgc

SEQ ID NO: 6521 - DNA, 24 bp, Artificial Sequence
  Description of Artificial Sequence: Synthetic oligonucleotide
taacagactcgttgatgtgtataa

SEQ ID NO: 6522 - DNA, 27 bp, Artificial Sequence
  Description of Artificial Sequence: Synthetic oligonucleotide
tccattattataaactgtgataatctt

SEQ ID NO: 6523 - DNA, 22 bp, Artificial Sequence
  Description of Artificial Sequence: Synthetic oligonucleotide
ggacctaaagtgtgaaaaaaag

SEQ ID NO: 6524 - DNA, 23 bp, Artificial Sequence
  Description of Artificial Sequence: Synthetic oligonucleotide
tcttactcaaaacagtgagcttc

SEQ ID NO: 6525 - DNA, 23 bp, Artificial Sequence
  Description of Artificial Sequence: Synthetic oligonucleotide
aactgtaggaaatgagtgcagta

SEQ ID NO: 6526 - DNA, 19 bp, Artificial Sequence
  Description of Artificial Sequence: Synthetic oligonucleotide
atgagttggtcttctcccc

SEQ ID NO: 6527 - DNA, 20 bp, Artificial Sequence
  Description of Artificial Sequence: Synthetic oligonucleotide
ggtgggtgagaaaatccaag

SEQ ID NO: 6528 - DNA, 22 bp, Artificial Sequence
  Description of Artificial Sequence: Synthetic oligonucleotide
acggctctaccaagatgattat

SEQ ID NO: 6529 - DNA, 19 bp, Artificial Sequence
  Description of Artificial Sequence: Synthetic oligonucleotide
tccctctccctcttgtgag

SEQ ID NO: 6530 - DNA, 22 bp, Artificial Sequence
  Description of Artificial Sequence: Synthetic oligonucleotide
cacctctcaattctgttctcag

SEQ ID NO: 6531 - DNA, 27 bp, Artificial Sequence
  Description of Artificial Sequence: Synthetic oligonucleotide
acatgttaatatctcaagaaagtatcc

SEQ ID NO: 6532 - DNA, 25 bp, Artificial Sequence
  Description of Artificial Sequence: Synthetic oligonucleotide
gatctatttatggacttttgatgtg

SEQ ID NO: 6533 - DNA, 19 bp, Artificial Sequence
  Description of Artificial Sequence: Synthetic oligonucleotide
ggctgatgttgatggagtg

SEQ ID NO: 6534 - DNA, 23 bp, Artificial Sequence
  Description of Artificial Sequence: Synthetic oligonucleotide
aaaaattaagtcagatgtgctca

SEQ ID NO: 6535 - DNA, 22 bp, Artificial Sequence
  Description of Artificial Sequence: Synthetic oligonucleotide
tttccaaagtgctgtaccattt

SEQ ID NO: 6536 - DNA, 25 bp, Artificial Sequence
  Description of Artificial Sequence: Synthetic oligonucleotide
tacataacatatttgcacatgtacc

SEQ ID NO: 6537 - DNA, 25 bp, Artificial Sequence
  Description of Artificial Sequence: Synthetic oligonucleotide
gataaggatatcaaaatgattacca

SEQ ID NO: 6538 - DNA, 22 bp, Artificial Sequence
  Description of Artificial Sequence: Synthetic oligonucleotide
aagcaaaattgttctcaattgt

SEQ ID NO: 6539 - DNA, 19 bp, Artificial Sequence
  Description of Artificial Sequence: Synthetic oligonucleotide
agggttggggtttgttaac

SEQ ID NO: 6540 - DNA, 23 bp, Artificial Sequence
  Description of Artificial Sequence: Synthetic oligonucleotide
cccagccttaatattttaagtct

SEQ ID NO: 6541 - DNA, 19 bp, Artificial Sequence
  Description of Artificial Sequence: Synthetic oligonucleotide
agatcttcagccagggatc

SEQ ID NO: 6542 - DNA, 19 bp, Artificial Sequence
  Description of Artificial Sequence: Synthetic oligonucleotide
agcatcagtggtgctctga

SEQ ID NO: 6543 - DNA, 19 bp, Artificial Sequence
  Description of Artificial Sequence: Synthetic oligonucleotide
agtgatttgtggaggggtg

SEQ ID NO: 6544 - DNA, 22 bp, Artificial Sequence
  Description of Artificial Sequence: Synthetic oligonucleotide
gttgaccatggctgatagtatg

SEQ ID NO: 6545 - DNA, 22 bp, Artificial Sequence
  Description of Artificial Sequence: Synthetic oligonucleotide
acagagagagaatatcccctct

SEQ ID NO: 6546 - DNA, 22 bp, Artificial Sequence
  Description of Artificial Sequence: Synthetic oligonucleotide
gtgagaggttcaagtgactgac

SEQ ID NO: 6547 - DNA, 23 bp, Artificial Sequence
  Description of Artificial Sequence: Synthetic oligonucleotide
ttgctcttattcttagggagttt

SEQ ID NO: 6548 - DNA, 22 bp, Artificial Sequence
  Description of Artificial Sequence: Synthetic oligonucleotide
tgaccccttcttccaaatatac

SEQ ID NO: 6549 - DNA, 25 bp, Artificial Sequence
  Description of Artificial Sequence: Synthetic oligonucleotide
tacatcgtaagttttttttatcttc

SEQ ID NO: 6550 - DNA, 27 bp, Artificial Sequence
  Description of Artificial Sequence: Synthetic oligonucleotide
gactttatttacaataatacatttcct

SEQ ID NO: 6551 - DNA, 20 bp, Artificial Sequence
  Description of Artificial Sequence: Synthetic oligonucleotide
agaagcagagccagatccag

SEQ ID NO: 6552 - DNA, 22 bp, Artificial Sequence
  Description of Artificial Sequence: Synthetic oligonucleotide
ctctgacaacacctcacctagt

SEQ ID NO: 6553 - DNA, 25 bp, Artificial Sequence
  Description of Artificial Sequence: Synthetic oligonucleotide
tacagataaatacttgggattcatc

SEQ ID NO: 6554 - DNA, 21 bp, Artificial Sequence
  Description of Artificial Sequence: Synthetic oligonucleotide
attccagaagcttcacaagac

SEQ ID NO: 6555 - DNA, 25 bp, Artificial Sequence
  Description of Artificial Sequence: Synthetic oligonucleotide
gtgaagtatctttttatggtgactt

SEQ ID NO: 6556 - DNA, 22 bp, Artificial Sequence
  Description of Artificial Sequence: Synthetic oligonucleotide
ctaaaccaaggccatctacatt

SEQ ID NO: 6557 - DNA, 27 bp, Artificial Sequence
  Description of Artificial Sequence: Synthetic oligonucleotide
ttagaagaagttaatgacttatgtctt

SEQ ID NO: 6558 - DNA, 27 bp, Artificial Sequence
  Description of Artificial Sequence: Synthetic oligonucleotide
cagttaaaaaaagtataaataaattga

SEQ ID NO: 6559 - DNA, 19 bp, Artificial Sequence
  Description of Artificial Sequence: Synthetic oligonucleotide
tcatccagcagctccttct

SEQ ID NO: 6560 - DNA, 22 bp, Artificial Sequence
  Description of Artificial Sequence: Synthetic oligonucleotide
gaggaaggaaggatgagtagat

SEQ ID NO: 6561 - DNA, 20 bp, Artificial Sequence
  Description of Artificial Sequence: Synthetic oligonucleotide
cagtaaacccaccactccag

SEQ ID NO: 6562 - DNA, 21 bp, Artificial Sequence
  Description of Artificial Sequence: Synthetic oligonucleotide
gtcttgcagcaatttttttct

SEQ ID NO: 6563 - DNA, 19 bp, Artificial Sequence
  Description of Artificial Sequence: Synthetic oligonucleotide
gaacctgaagagccagcac

SEQ ID NO: 6564 - DNA, 26 bp, Artificial Sequence
  Description of Artificial Sequence: Synthetic oligonucleotide
ggcattctataataaacttaacatct

SEQ ID NO: 6565 - DNA, 19 bp, Artificial Sequence
  Description of Artificial Sequence: Synthetic oligonucleotide
caagggacccactgatctc

SEQ ID NO: 6566 - DNA, 20 bp, Artificial Sequence
  Description of Artificial Sequence: Synthetic oligonucleotide
aaaaagacccggagtgtcac

SEQ ID NO: 6567 - DNA, 23 bp, Artificial Sequence
  Description of Artificial Sequence: Synthetic oligonucleotide
aactgagatggctagctactaag

SEQ ID NO: 6568 - DNA, 20 bp, Artificial Sequence
  Description of Artificial Sequence: Synthetic oligonucleotide
catcctttgcttttctctcc

SEQ ID NO: 6569 - DNA, 21 bp, Artificial Sequence
  Description of Artificial Sequence: Synthetic oligonucleotide
gaggcaactctagcagaattg

SEQ ID NO: 6570 - DNA, 27 bp, Artificial Sequence
  Description of Artificial Sequence: Synthetic oligonucleotide
gtgtttatctgaatattttcttttagc

SEQ ID NO: 6571 - DNA, 24 bp, Artificial Sequence
  Description of Artificial Sequence: Synthetic oligonucleotide
caaactacagactgaatttctttc

SEQ ID NO: 6572 - DNA, 19 bp, Artificial Sequence
  Description of Artificial Sequence: Synthetic oligonucleotide
tcataccctggtgggacat

SEQ ID NO: 6573 - DNA, 23 bp, Artificial Sequence
  Description of Artificial Sequence: Synthetic oligonucleotide
cataccaggcagaaaaaaattat

SEQ ID NO: 6574 - DNA, 19 bp, Artificial Sequence
  Description of Artificial Sequence: Synthetic oligonucleotide
cctctgtaccccacctcct

SEQ ID NO: 6575 - DNA, 19 bp, Artificial Sequence
  Description of Artificial Sequence: Synthetic oligonucleotide
cctggtgagaactggagag

SEQ ID NO: 6576 - DNA, 25 bp, Artificial Sequence
  Description of Artificial Sequence: Synthetic oligonucleotide
tagagagtaatagtgcactgaagaa

SEQ ID NO: 6577 - DNA, 21 bp, Artificial Sequence
  Description of Artificial Sequence: Synthetic oligonucleotide
acacacacattcacacctgtc

SEQ ID NO: 6578 - DNA, 22 bp, Artificial Sequence
  Description of Artificial Sequence: Synthetic oligonucleotide
ctagtagtggtgagtgggcaat

SEQ ID NO: 6579 - DNA, 21 bp, Artificial Sequence
  Description of Artificial Sequence: Synthetic oligonucleotide
gtgttaagcctctgtctctgg

SEQ ID NO: 6580 - DNA, 21 bp, Artificial Sequence
  Description of Artificial Sequence: Synthetic oligonucleotide
ctactacaatcagagcgaggc

SEQ ID NO: 6581 - DNA, 21 bp, Artificial Sequence
  Description of Artificial Sequence: Synthetic oligonucleotide
cttgtccagttttgacaattc

SEQ ID NO: 6582 - DNA, 21 bp, Artificial Sequence
  Description of Artificial Sequence: Synthetic oligonucleotide
agtgaatccttccaccttctc

SEQ ID NO: 6583 - DNA, 23 bp, Artificial Sequence
  Description of Artificial Sequence: Synthetic oligonucleotide
aatgccaacctagaattctttac

SEQ ID NO: 6584 - DNA, 18 bp, Artificial Sequence
  Description of Artificial Sequence: Synthetic oligonucleotide
ccatcaccaagcacactc

SEQ ID NO: 6585 - DNA, 21 bp, Artificial Sequence
  Description of Artificial Sequence: Synthetic oligonucleotide
agtcattgagggtattgcaga

SEQ ID NO: 6586 - DNA, 20 bp, Artificial Sequence
  Description of Artificial Sequence: Synthetic oligonucleotide
ttctcaccaatatcgccatt

SEQ ID NO: 6587 - DNA, 20 bp, Artificial Sequence
  Description of Artificial Sequence: Synthetic oligonucleotide
ctcttgactgtcccccactt

SEQ ID NO: 6588 - DNA, 24 bp, Artificial Sequence
  Description of Artificial Sequence: Synthetic oligonucleotide
acaaagaaaaaattgataaattgg

SEQ ID NO: 6589 - DNA, 21 bp, Artificial Sequence
  Description of Artificial Sequence: Synthetic oligonucleotide
gtcactctgaggcactaggaa

SEQ ID NO: 6590 - DNA, 19 bp, Artificial Sequence
  Description of Artificial Sequence: Synthetic oligonucleotide
gatggatggaggtagggag

SEQ ID NO: 6591 - DNA, 18 bp, Artificial Sequence
  Description of Artificial Sequence: Synthetic oligonucleotide
ctcacacaacggacaagg

SEQ ID NO: 6592 - DNA, 20 bp, Artificial Sequence
  Description of Artificial Sequence: Synthetic oligonucleotide
tctctgctgagccagaagat

SEQ ID NO: 6593 - DNA, 22 bp, Artificial Sequence
  Description of Artificial Sequence: Synthetic oligonucleotide
ctcctctctgtgtctgagagtt

SEQ ID NO: 6594 - DNA, 20 bp, Artificial Sequence
  Description of Artificial Sequence: Synthetic oligonucleotide
tatcccaagctgggaaatgt

SEQ ID NO: 6595 - DNA, 20 bp, Artificial Sequence
  Description of Artificial Sequence: Synthetic oligonucleotide
cagtgttccccaaaccttgt

SEQ ID NO: 6596 - DNA, 23 bp, Artificial Sequence
  Description of Artificial Sequence: Synthetic oligonucleotide
aaataaaattttcccaattatgc

SEQ ID NO: 6597 - DNA, 19 bp, Artificial Sequence
  Description of Artificial Sequence: Synthetic oligonucleotide
gggagggtgatatcagcac

SEQ ID NO: 6598 - DNA, 26 bp, Artificial Sequence
  Description of Artificial Sequence: Synthetic oligonucleotide
tctttgaagattttaaaacattaatt

SEQ ID NO: 6599 - DNA, 22 bp, Artificial Sequence
  Description of Artificial Sequence: Synthetic oligonucleotide
gtctatgacacagcccctctat

SEQ ID NO: 6600 - DNA, 23 bp, Artificial Sequence
  Description of Artificial Sequence: Synthetic oligonucleotide
gaccagaaattagatttgagtcc

SEQ ID NO: 6601 - DNA, 26 bp, Artificial Sequence
  Description of Artificial Sequence: Synthetic oligonucleotide
atcaatcacttcctaatattaataaa

SEQ ID NO: 6602 - DNA, 20 bp, Artificial Sequence
  Description of Artificial Sequence: Synthetic oligonucleotide
cttgttagcacccactgaat

SEQ ID NO: 6603 - DNA, 24 bp, Artificial Sequence
  Description of Artificial Sequence: Synthetic oligonucleotide
atagtagccaacattcatctagtg

SEQ ID NO: 6604 - DNA, 18 bp, Artificial Sequence
  Description of Artificial Sequence: Synthetic oligonucleotide
cactgggagtttcaagcc

SEQ ID NO: 6605 - DNA, 26 bp, Artificial Sequence
  Description of Artificial Sequence: Synthetic oligonucleotide
gtgtttgaaagagtatatcaataaga

SEQ ID NO: 6606 - DNA, 18 bp, Artificial Sequence
  Description of Artificial Sequence: Synthetic oligonucleotide
cagttcctgagctccatg

SEQ ID NO: 6607 - DNA, 21 bp, Artificial Sequence
  Description of Artificial Sequence: Synthetic oligonucleotide
gtgatgactgccctgataaag

SEQ ID NO: 6608 - DNA, 19 bp, Artificial Sequence
  Description of Artificial Sequence: Synthetic oligonucleotide
ctgcagtccaagtacgctg

SEQ ID NO: 6609 - DNA, 20 bp, Artificial Sequence
  Description of Artificial Sequence: Synthetic oligonucleotide
gagggttcatgtctaggtcc

SEQ ID NO: 6610 - DNA, 20 bp, Artificial Sequence
  Description of Artificial Sequence: Synthetic oligonucleotide
cctaagtcagcctcttcacc

SEQ ID NO: 6611 - DNA, 20 bp, Artificial Sequence
  Description of Artificial Sequence: Synthetic oligonucleotide
ctcagggaacaattcctagg

SEQ ID NO: 6612 - DNA, 23 bp, Artificial Sequence
  Description of Artificial Sequence: Synthetic oligonucleotide
atctcacctaggttttcaaattt

SEQ ID NO: 6613 - DNA, 26 bp, Artificial Sequence
  Description of Artificial Sequence: Synthetic oligonucleotide
atgattacataacatcctttattatc

SEQ ID NO: 6614 - DNA, 21 bp, Artificial Sequence
  Description of Artificial Sequence: Synthetic oligonucleotide
ctccccacctcctcacattat

SEQ ID NO: 6615 - DNA, 26 bp, Artificial Sequence
  Description of Artificial Sequence: Synthetic oligonucleotide
attaaaactctataaatggtagctgt

SEQ ID NO: 6616 - DNA, 27 bp, Artificial Sequence
  Description of Artificial Sequence: Synthetic oligonucleotide
cttcttttaaaggttaaataatattca

SEQ ID NO: 6617 - DNA, 20 bp, Artificial Sequence
  Description of Artificial Sequence: Synthetic oligonucleotide
ggtaccagggaacacaagac

SEQ ID NO: 6618 - DNA, 20 bp, Artificial Sequence
  Description of Artificial Sequence: Synthetic oligonucleotide
agctgtttcctcttggaaag

SEQ ID NO: 6619 - DNA, 24 bp, Artificial Sequence
  Description of Artificial Sequence: Synthetic oligonucleotide
acatgtcaattttattgttagagc

SEQ ID NO: 6620 - DNA, 21 bp, Artificial Sequence
  Description of Artificial Sequence: Synthetic oligonucleotide
acaggtgcatcttgtatttgc

SEQ ID NO: 6621 - DNA, 18 bp, Artificial Sequence
  Description of Artificial Sequence: Synthetic oligonucleotide
tcttcttgctcaggctgg

SEQ ID NO: 6622 - DNA, 20 bp, Artificial Sequence
  Description of Artificial Sequence: Synthetic oligonucleotide
gctgattggcttctctagaa

SEQ ID NO: 6623 - DNA, 20 bp, Artificial Sequence
  Description of Artificial Sequence: Synthetic oligonucleotide
ctctcaggtcatcacacacc

SEQ ID NO: 6624 - DNA, 26 bp, Artificial Sequence
  Description of Artificial Sequence: Synthetic oligonucleotide
taacgactcctttaatttaaactaaa

SEQ ID NO: 6625 - DNA, 20 bp, Artificial Sequence
  Description of Artificial Sequence: Synthetic oligonucleotide
ggggtatcagaggaaggtag

SEQ ID NO: 6626 - DNA, 26 bp, Artificial Sequence
  Description of Artificial Sequence: Synthetic oligonucleotide
ggaaaaataatatgtaaacatttttg

SEQ ID NO: 6627 - DNA, 23 bp, Artificial Sequence
  Description of Artificial Sequence: Synthetic oligonucleotide
gagagagaaaatccagaaaacac

SEQ ID NO: 6628 - DNA, 24 bp, Artificial Sequence
  Description of Artificial Sequence: Synthetic oligonucleotide
aacattttgaaatgactaaattca

SEQ ID NO: 6629 - DNA, 21 bp, Artificial Sequence
  Description of Artificial Sequence: Synthetic oligonucleotide
ctgttggcatgatctttaacc

SEQ ID NO: 6630 - DNA, 20 bp, Artificial Sequence
  Description of Artificial Sequence: Synthetic oligonucleotide
cccaggacatcatcatctac

SEQ ID NO: 6631 - DNA, 20 bp, Artificial Sequence
  Description of Artificial Sequence: Synthetic oligonucleotide
gtacatgtaaatcccctccc

SEQ ID NO: 6632 - DNA, 20 bp, Artificial Sequence
  Description of Artificial Sequence: Synthetic oligonucleotide
accttaagttgccaccttct

SEQ ID NO: 6633 - DNA, 26 bp, Artificial Sequence
  Description of Artificial Sequence: Synthetic oligonucleotide
agtaaattctttagcttgtctagatt

SEQ ID NO: 6634 - DNA, 23 bp, Artificial Sequence
  Description of Artificial Sequence: Synthetic oligonucleotide
aatattgaaattcttgggttagg

SEQ ID NO: 6635 - DNA, 20 bp, Artificial Sequence
  Description of Artificial Sequence: Synthetic oligonucleotide
gcaaggtctactgggaagtg

SEQ ID NO: 6636 - DNA, 22 bp, Artificial Sequence
  Description of Artificial Sequence: Synthetic oligonucleotide
ccactggagaagagagagaaag

SEQ ID NO: 6637 - DNA, 20 bp, Artificial Sequence
  Description of Artificial Sequence: Synthetic oligonucleotide
ctctcactggcttgttcctt

SEQ ID NO: 6638 - DNA, 18 bp, Artificial Sequence
  Description of Artificial Sequence: Synthetic oligonucleotide
gcttcttgatgggctctg

SEQ ID NO: 6639 - DNA, 26 bp, Artificial Sequence
  Description of Artificial Sequence: Synthetic oligonucleotide
aagaacttctagtattcaacagtaaa

SEQ ID NO: 6640 - DNA, 25 bp, Artificial Sequence
  Description of Artificial Sequence: Synthetic oligonucleotide
taactgtaagatgttcaaagatgaa

SEQ ID NO: 6641 - DNA, 24 bp, Artificial Sequence
  Description of Artificial Sequence: Synthetic oligonucleotide
attaatagtaatgtttgcaaagca

SEQ ID NO: 6642 - DNA, 21 bp, Artificial Sequence
  Description of Artificial Sequence: Synthetic oligonucleotide
gtgccctcttctcttaacctg

SEQ ID NO: 6643 - DNA, 18 bp, Artificial Sequence
  Description of Artificial Sequence: Synthetic oligonucleotide
cttcttggcctcttccag

SEQ ID NO: 6644 - DNA, 21 bp, Artificial Sequence
  Description of Artificial Sequence: Synthetic oligonucleotide
ggaggagtggactagaaggtg

SEQ ID NO: 6645 - DNA, 20 bp, Artificial Sequence
  Description of Artificial Sequence: Synthetic oligonucleotide
cttggtgagtgaaacttggg

SEQ ID NO: 6646 - DNA, 20 bp, Artificial Sequence
  Description of Artificial Sequence: Synthetic oligonucleotide
caatgacacagcaactttgc

SEQ ID NO: 6647 - DNA, 21 bp, Artificial Sequence
  Description of Artificial Sequence: Synthetic oligonucleotide
gtgtcagaaactggagccata

SEQ ID NO: 6648 - DNA, 20 bp, Artificial Sequence
  Description of Artificial Sequence: Synthetic oligonucleotide
gaaggctagtgcttggagag

SEQ ID NO: 6649 - DNA, 23 bp, Artificial Sequence
  Description of Artificial Sequence: Synthetic oligonucleotide
acacgatgtgtaagtcctagaag

SEQ ID NO: 6650 - DNA, 26 bp, Artificial Sequence
  Description of Artificial Sequence: Synthetic oligonucleotide
atgttaatttgatttaataatttcaa

SEQ ID NO: 6651 - DNA, 19 bp, Artificial Sequence
  Description of Artificial Sequence: Synthetic oligonucleotide
ccagagctggaagggagag

SEQ ID NO: 6652 - DNA, 20 bp, Artificial Sequence
  Description of Artificial Sequence: Synthetic oligonucleotide
aaccagtgatgggtgacaag

SEQ ID NO: 6653 - DNA, 21 bp, Artificial Sequence
  Description of Artificial Sequence: Synthetic oligonucleotide
atgccgtgtcaaaaaaaataa

SEQ ID NO: 6654 - DNA, 24 bp, Artificial Sequence
  Description of Artificial Sequence: Synthetic oligonucleotide
tatagatgtctgatgatagttggg

SEQ ID NO: 6655 - DNA, 20 bp, Artificial Sequence
  Description of Artificial Sequence: Synthetic oligonucleotide
aatggctctggtaagacctg

SEQ ID NO: 6656 - DNA, 24 bp, Artificial Sequence
  Description of Artificial Sequence: Synthetic oligonucleotide
tccatatctatatctcttatgccc

SEQ ID NO: 6657 - DNA, 20 bp, Artificial Sequence
  Description of Artificial Sequence: Synthetic oligonucleotide
cctcacaacagtcacagtgg

SEQ ID NO: 6658 - DNA, 25 bp, Artificial Sequence
  Description of Artificial Sequence: Synthetic oligonucleotide
cttctttatttaagaaaaaagtgat

SEQ ID NO: 6659 - DNA, 26 bp, Artificial Sequence
  Description of Artificial Sequence: Synthetic oligonucleotide
ctctaaagttagttttagtttggaaa

SEQ ID NO: 6660 - DNA, 25 bp, Artificial Sequence
  Description of Artificial Sequence: Synthetic oligonucleotide
caaaagaattataagctactgatgt

SEQ ID NO: 6661 - DNA, 20 bp, Artificial Sequence
  Description of Artificial Sequence: Synthetic oligonucleotide
gtttcttcactacgaggggt

SEQ ID NO: 6662 - DNA, 19 bp, Artificial Sequence
  Description of Artificial Sequence: Synthetic oligonucleotide
ggggttgttgtgaggattt

SEQ ID NO: 6663 - DNA, 22 bp, Artificial Sequence
  Description of Artificial Sequence: Synthetic oligonucleotide
catacacactctcttgagcatg

SEQ ID NO: 6664 - DNA, 23 bp, Artificial Sequence
  Description of Artificial Sequence: Synthetic oligonucleotide
tgaggataaagcaattaaacttt

SEQ ID NO: 6665 - DNA, 25 bp, Artificial Sequence
  Description of Artificial Sequence: Synthetic oligonucleotide
aatagggtctaacttaatttgagat

SEQ ID NO: 6666 - DNA, 18 bp, Artificial Sequence
  Description of Artificial Sequence: Synthetic oligonucleotide
gcttcaggaggtggctgt

SEQ ID NO: 6667 - DNA, 19 bp, Artificial Sequence
  Description of Artificial Sequence: Synthetic oligonucleotide
agtgtgtgccccagtttac

SEQ ID NO: 6668 - DNA, 25 bp, Artificial Sequence
  Description of Artificial Sequence: Synthetic oligonucleotide
attccagacttaaacttaagatata

SEQ ID NO: 6669 - DNA, 20 bp, Artificial Sequence
  Description of Artificial Sequence: Synthetic oligonucleotide
cctcacagtgtgaataaact

SEQ ID NO: 6670 - DNA, 23 bp, Artificial Sequence
  Description of Artificial Sequence: Synthetic oligonucleotide
aaattattgggatgtgttttctt

SEQ ID NO: 6671 - DNA, 17 bp, Artificial Sequence
  Description of Artificial Sequence: Synthetic oligonucleotide
gctgggtagctgactgc

SEQ ID NO: 6672 - DNA, 24 bp, Artificial Sequence
  Description of Artificial Sequence: Synthetic oligonucleotide
aataatgacttcttagcactgacc

SEQ ID NO: 6673 - DNA, 19 bp, Artificial Sequence
  Description of Artificial Sequence: Synthetic oligonucleotide
gagctagtgcttcctgctg

SEQ ID NO: 6674 - DNA, 19 bp, Artificial Sequence
  Description of Artificial Sequence: Synthetic oligonucleotide
ggccgtgttcagtccttct

SEQ ID NO: 6675 - DNA, 19 bp, Artificial Sequence
  Description of Artificial Sequence: Synthetic oligonucleotide
cagaggggcagaggtttag

SEQ ID NO: 6676 - DNA, 23 bp, Artificial Sequence
  Description of Artificial Sequence: Synthetic oligonucleotide
tctttatccagtttaccaaaaaa

SEQ ID NO: 6677 - DNA, 20 bp, Artificial Sequence
  Description of Artificial Sequence: Synthetic oligonucleotide
gtgatgtcaacgagtgcttc

SEQ ID NO: 6678 - DNA, 26 bp, Artificial Sequence
  Description of Artificial Sequence: Synthetic oligonucleotide
agttattttacatacactattcttgg

SEQ ID NO: 6679 - DNA, 18 bp, Artificial Sequence
  Description of Artificial Sequence: Synthetic oligonucleotide
tggaagaagagttccggc

SEQ ID NO: 6680 - DNA, 27 bp, Artificial Sequence
  Description of Artificial Sequence: Synthetic oligonucleotide
agtaaataaccagtactaagttcttcc

SEQ ID NO: 6681 - DNA, 20 bp, Artificial Sequence
  Description of Artificial Sequence: Synthetic oligonucleotide
ttgcttggcgaaaacactac

SEQ ID NO: 6682 - DNA, 26 bp, Artificial Sequence
  Description of Artificial Sequence: Synthetic oligonucleotide
ctagatgaagaggactacatacattt

SEQ ID NO: 6683 - DNA, 26 bp, Artificial Sequence
  Description of Artificial Sequence: Synthetic oligonucleotide
acttttaatacttaaataacgacaat

SEQ ID NO: 6684 - DNA, 24 bp, Artificial Sequence
  Description of Artificial Sequence: Synthetic oligonucleotide
ttttgaaaataaagaacagaaaac

SEQ ID NO: 6685 - DNA, 23 bp, Artificial Sequence
  Description of Artificial Sequence: Synthetic oligonucleotide
gaccaataaaaaaatgaacatga

SEQ ID NO: 6686 - DNA, 19 bp, Artificial Sequence
  Description of Artificial Sequence: Synthetic oligonucleotide
ggaactgaggggacagaat

SEQ ID NO: 6687 - DNA, 26 bp, Artificial Sequence
  Description of Artificial Sequence: Synthetic oligonucleotide
tctatgatcaagagtagattaagaga

SEQ ID NO: 6688 - DNA, 27 bp, Artificial Sequence
  Description of Artificial Sequence: Synthetic oligonucleotide
gtataagttattgttctgagttcttca

SEQ ID NO: 6689 - DNA, 18 bp, Artificial Sequence
  Description of Artificial Sequence: Synthetic oligonucleotide
gacataaaattgctgccc

SEQ ID NO: 6690 - DNA, 19 bp, Artificial Sequence
  Description of Artificial Sequence: Synthetic oligonucleotide
cctagctactccccacaga

SEQ ID NO: 6691 - DNA, 24 bp, Artificial Sequence
  Description of Artificial Sequence: Synthetic oligonucleotide
aatagcaatttaattagcaagcta

SEQ ID NO: 6692 - DNA, 27 bp, Artificial Sequence
  Description of Artificial Sequence: Synthetic oligonucleotide
taaactatcattatgctattattattg

SEQ ID NO: 6693 - DNA, 19 bp, Artificial Sequence
  Description of Artificial Sequence: Synthetic oligonucleotide
ctgggacttggctcttacc

SEQ ID NO: 6694 - DNA, 21 bp, Artificial Sequence
  Description of Artificial Sequence: Synthetic oligonucleotide
ctgtgttccgtacgacaatat

SEQ ID NO: 6695 - DNA, 18 bp, Artificial Sequence
  Description of Artificial Sequence: Synthetic oligonucleotide
tgagaaaccttccgctcc

SEQ ID NO: 6696 - DNA, 26 bp, Artificial Sequence
  Description of Artificial Sequence: Synthetic oligonucleotide
tgctctaaatttattagtgttattgt

SEQ ID NO: 6697 - DNA, 26 bp, Artificial Sequence
  Description of Artificial Sequence: Synthetic oligonucleotide
tatatatttctttctaggacttgaaa

SEQ ID NO: 6698 - DNA, 17 bp, Artificial Sequence
  Description of Artificial Sequence: Synthetic oligonucleotide
ctccctcttccttccgg

SEQ ID NO: 6699 - DNA, 19 bp, Artificial Sequence
  Description of Artificial Sequence: Synthetic oligonucleotide
gagctgaccgtgacagatg

SEQ ID NO: 6700 - DNA, 17 bp, Artificial Sequence
  Description of Artificial Sequence: Synthetic oligonucleotide
cgagatgggctcgtctc

SEQ ID NO: 6701 - DNA, 21 bp, Artificial Sequence
  Description of Artificial Sequence: Synthetic oligonucleotide
ttttttttttgccatgaggat

SEQ ID NO: 6702 - DNA, 20 bp, Artificial Sequence
  Description of Artificial Sequence: Synthetic oligonucleotide
gagagtggccagatggagac

SEQ ID NO: 6703 - DNA, 27 bp, Artificial Sequence
  Description of Artificial Sequence: Synthetic oligonucleotide
acattgttattaaaggtatttacaaga

SEQ ID NO: 6704 - DNA, 23 bp, Artificial Sequence
  Description of Artificial Sequence: Synthetic oligonucleotide
aaacaaaatttcaataactggct

SEQ ID NO: 6705 - DNA, 19 bp, Artificial Sequence
  Description of Artificial Sequence: Synthetic oligonucleotide
cacctcctgatgaaggagg

SEQ ID NO: 6706 - DNA, 27 bp, Artificial Sequence
  Description of Artificial Sequence: Synthetic oligonucleotide
acattgaaatcatacagaatatatttt

SEQ ID NO: 6707 - DNA, 18 bp, Artificial Sequence
  Description of Artificial Sequence: Synthetic oligonucleotide
gtgagtcccaagcacctt

SEQ ID NO: 6708 - DNA, 24 bp, Artificial Sequence
  Description of Artificial Sequence: Synthetic oligonucleotide
aaaaaaaagaacgttatgtatcta

SEQ ID NO: 6709 - DNA, 22 bp, Artificial Sequence
  Description of Artificial Sequence: Synthetic oligonucleotide
gattctttgattgggatgtttc

SEQ ID NO: 6710 - DNA, 18 bp, Artificial Sequence
  Description of Artificial Sequence: Synthetic oligonucleotide
cttctcaccctgtgggac

SEQ ID NO: 6711 - DNA, 18 bp, Artificial Sequence
  Description of Artificial Sequence: Synthetic oligonucleotide
gtgtagggcagatctgcc

SEQ ID NO: 6712 - DNA, 21 bp, Artificial Sequence
  Description of Artificial Sequence: Synthetic oligonucleotide
aagagtccagctctttccttt

SEQ ID NO: 6713 - DNA, 18 bp, Artificial Sequence
  Description of Artificial Sequence: Synthetic oligonucleotide
cagcttccttcctggggt

SEQ ID NO: 6714 - DNA, 25 bp, Artificial Sequence
  Description of Artificial Sequence: Synthetic oligonucleotide
ctgaaattctttttttaatttaaaa

SEQ ID NO: 6715 - DNA, 19 bp, Artificial Sequence
  Description of Artificial Sequence: Synthetic oligonucleotide
agtgattgggttcaggcag

SEQ ID NO: 6716 - DNA, 20 bp, Artificial Sequence
  Description of Artificial Sequence: Synthetic oligonucleotide
gtgtgtgtgtgcctgtgtgt

SEQ ID NO: 6717 - DNA, 19 bp, Artificial Sequence
  Description of Artificial Sequence: Synthetic oligonucleotide
cttctcccaccatcactgt

SEQ ID NO: 6718 - DNA, 17 bp, Artificial Sequence
  Description of Artificial Sequence: Synthetic oligonucleotide
gaatggcacgtctggag

SEQ ID NO: 6719 - DNA, 16 bp, Artificial Sequence
  Description of Artificial Sequence: Synthetic oligonucleotide
acctcctcctccagcc

SEQ ID NO: 6720 - DNA, 19 bp, Artificial Sequence
  Description of Artificial Sequence: Synthetic oligonucleotide
gttcagaaacctggggcag

SEQ ID NO: 6721 - DNA, 16 bp, Artificial Sequence
  Description of Artificial Sequence: Synthetic oligonucleotide
gaggaccgccaggaac

SEQ ID NO: 6722 - DNA, 23 bp, Artificial Sequence
  Description of Artificial Sequence: Synthetic oligonucleotide
tctctaattagcacaggtctgtt

SEQ ID NO: 6723 - DNA, 23 bp, Artificial Sequence
  Description of Artificial Sequence: Synthetic oligonucleotide
acaataaacatttacaagccaga

SEQ ID NO: 6724 - DNA, 24 bp, Artificial Sequence
  Description of Artificial Sequence: Synthetic oligonucleotide
actatacattgcttaaatgcagtg

SEQ ID NO: 6725 - DNA, 23 bp, Artificial Sequence
  Description of Artificial Sequence: Synthetic oligonucleotide
aatttttggcttcatgtagtgta

SEQ ID NO: 6726 - DNA, 23 bp, Artificial Sequence
  Description of Artificial Sequence: Synthetic oligonucleotide
acatatacttttggtcacccttt

SEQ ID NO: 6727 - DNA, 23 bp, Artificial Sequence
  Description of Artificial Sequence: Synthetic oligonucleotide
gtgaccatgttttattttcttgt

SEQ ID NO: 6728 - DNA, 23 bp, Artificial Sequence
  Description of Artificial Sequence: Synthetic oligonucleotide
cagaggtcaaaggttagtatcag

SEQ ID NO: 6729 - DNA, 24 bp, Artificial Sequence
  Description of Artificial Sequence: Synthetic oligonucleotide
tgaattctaaatccttaacatcca

SEQ ID NO: 6730 - DNA, 22 bp, Artificial Sequence
  Description of Artificial Sequence: Synthetic oligonucleotide
ggggaattttctaccattttta

SEQ ID NO: 6731 - DNA, 23 bp, Artificial Sequence
  Description of Artificial Sequence: Synthetic oligonucleotide
gtcttgtggagaccttactcatt

SEQ ID NO: 6732 - DNA, 23 bp, Artificial Sequence
  Description of Artificial Sequence: Synthetic oligonucleotide
gagactgccatatctttctgttt

SEQ ID NO: 6733 - DNA, 22 bp, Artificial Sequence
  Description of Artificial Sequence: Synthetic oligonucleotide
aagagtttttgaggaaaatcag

SEQ ID NO: 6734 - DNA, 25 bp, Artificial Sequence
  Description of Artificial Sequence: Synthetic oligonucleotide
agacagagttatccacataaatttg

SEQ ID NO: 6735 - DNA, 22 bp, Artificial Sequence
  Description of Artificial Sequence: Synthetic oligonucleotide
acatttcatgctgaaagatgat

SEQ ID NO: 6736 - DNA, 23 bp, Artificial Sequence
  Description of Artificial Sequence: Synthetic oligonucleotide
agagtgagatgctgatgtgtaag

SEQ ID NO: 6737 - DNA, 23 bp, Artificial Sequence
  Description of Artificial Sequence: Synthetic oligonucleotide
gaagaatagcaagagaccaaatc

SEQ ID NO: 6738 - DNA, 24 bp, Artificial Sequence
  Description of Artificial Sequence: Synthetic oligonucleotide
ctcatctcactgatttttagttgg

SEQ ID NO: 6739 - DNA, 22 bp, Artificial Sequence
  Description of Artificial Sequence: Synthetic oligonucleotide
ggggacagacttttcttgttag

SEQ ID NO: 6740 - DNA, 22 bp, Artificial Sequence
  Description of Artificial Sequence: Synthetic oligonucleotide
atcacttctcatgctgctatct

SEQ ID NO: 6741 - DNA, 25 bp, Artificial Sequence
  Description of Artificial Sequence: Synthetic oligonucleotide
tacatcttatttctgcctctagttt

SEQ ID NO: 6742 - DNA, 22 bp, Artificial Sequence
  Description of Artificial Sequence: Synthetic oligonucleotide
ctccttaaacctcttcctcatt

SEQ ID NO: 6743 - DNA, 22 bp, Artificial Sequence
  Description of Artificial Sequence: Synthetic oligonucleotide
ctcttctccctcctctgtagac

SEQ ID NO: 6744 - DNA, 23 bp, Artificial Sequence
  Description of Artificial Sequence: Synthetic oligonucleotide
gttctttaagtccttaagcaccc

SEQ ID NO: 6745 - DNA, 25 bp, Artificial Sequence
  Description of Artificial Sequence: Synthetic oligonucleotide
tatgtgaaagtttgtcatagctaag

SEQ ID NO: 6746 - DNA, 22 bp, Artificial Sequence
  Description of Artificial Sequence: Synthetic oligonucleotide
ccaaatcatttacttttctgtg

SEQ ID NO: 6747 - DNA, 21 bp, Artificial Sequence
  Description of Artificial Sequence: Synthetic oligonucleotide
caatttacaccggaaattagg

SEQ ID NO: 6748 - DNA, 23 bp, Artificial Sequence
  Description of Artificial Sequence: Synthetic oligonucleotide
agacagctcatcctaacctagtc

SEQ ID NO: 6749 - DNA, 23 bp, Artificial Sequence
  Description of Artificial Sequence: Synthetic oligonucleotide
gatcctactacagcagtttcttg

SEQ ID NO: 6750 - DNA, 21 bp, Artificial Sequence
  Description of Artificial Sequence: Synthetic oligonucleotide
aagtttccaaaatgaaccctt

SEQ ID NO: 6751 - DNA, 24 bp, Artificial Sequence
  Description of Artificial Sequence: Synthetic oligonucleotide
actccaaaaattaagactgagacc

SEQ ID NO: 6752 - DNA, 21 bp, Artificial Sequence
  Description of Artificial Sequence: Synthetic oligonucleotide
gtcttgatttcccccttaatg

SEQ ID NO: 6753 - DNA, 26 bp, Artificial Sequence
  Description of Artificial Sequence: Synthetic oligonucleotide
ataaagtttacttgttttacattcca

SEQ ID NO: 6754 - DNA, 21 bp, Artificial Sequence
  Description of Artificial Sequence: Synthetic oligonucleotide
tgctgtaaatgcaggtctctt

SEQ ID NO: 6755 - DNA, 21 bp, Artificial Sequence
  Description of Artificial Sequence: Synthetic oligonucleotide
tcaagcaaactcttgggttaa

SEQ ID NO: 6756 - DNA, 22 bp, Artificial Sequence
  Description of Artificial Sequence: Synthetic oligonucleotide
ggagagaaaggagaaaaatcag

SEQ ID NO: 6757 - DNA, 24 bp, Artificial Sequence
  Description of Artificial Sequence: Synthetic oligonucleotide
tccacaagtcatctctatatcttc

SEQ ID NO: 6758 - DNA, 26 bp, Artificial Sequence
  Description of Artificial Sequence: Synthetic oligonucleotide
cttttagacactttatatatcaaggg

SEQ ID NO: 6759 - DNA, 21 bp, Artificial Sequence
  Description of Artificial Sequence: Synthetic oligonucleotide
ccaaagtcccaggtttacaag

SEQ ID NO: 6760 - DNA, 23 bp, Artificial Sequence
  Description of Artificial Sequence: Synthetic oligonucleotide
tagaagtatctttccaaccctct

SEQ ID NO: 6761 - DNA, 23 bp, Artificial Sequence
  Description of Artificial Sequence: Synthetic oligonucleotide
aagcaatgaacaagttgacttta

SEQ ID NO: 6762 - DNA, 22 bp, Artificial Sequence
  Description of Artificial Sequence: Synthetic oligonucleotide
agtgaccctggagagatacttt

SEQ ID NO: 6763 - DNA, 22 bp, Artificial Sequence
  Description of Artificial Sequence: Synthetic oligonucleotide
caggaagataccaccaaagtta

SEQ ID NO: 6764 - DNA, 24 bp, Artificial Sequence
  Description of Artificial Sequence: Synthetic oligonucleotide
gatctcctttagaccttaactgtt

SEQ ID NO: 6765 - DNA, 23 bp, Artificial Sequence
  Description of Artificial Sequence: Synthetic oligonucleotide
ctaatccagctcttacaatctca

SEQ ID NO: 6766 - DNA, 23 bp, Artificial Sequence
  Description of Artificial Sequence: Synthetic oligonucleotide
atgggctaatgtaaacaaatgta

SEQ ID NO: 6767 - DNA, 23 bp, Artificial Sequence
  Description of Artificial Sequence: Synthetic oligonucleotide
ttaaggacacctgtactgagaag

SEQ ID NO: 6768 - DNA, 23 bp, Artificial Sequence
  Description of Artificial Sequence: Synthetic oligonucleotide
gtgaaactgggatgataataatg

SEQ ID NO: 6769 - DNA, 23 bp, Artificial Sequence
  Description of Artificial Sequence: Synthetic oligonucleotide
cttcaccccatctacaatatttt

SEQ ID NO: 6770 - DNA, 23 bp, Artificial Sequence
  Description of Artificial Sequence: Synthetic oligonucleotide
gacagaatctagagccttcaaat

SEQ ID NO: 6771 - DNA, 23 bp, Artificial Sequence
  Description of Artificial Sequence: Synthetic oligonucleotide
ctaccctgacttaactagctcct

SEQ ID NO: 6772 - DNA, 23 bp, Artificial Sequence
  Description of Artificial Sequence: Synthetic oligonucleotide
agataaggcacaaccctattact

SEQ ID NO: 6773 - DNA, 23 bp, Artificial Sequence
  Description of Artificial Sequence: Synthetic oligonucleotide
ggagaatattagagagagatggg

SEQ ID NO: 6774 - DNA, 23 bp, Artificial Sequence
  Description of Artificial Sequence: Synthetic oligonucleotide
ggagactgaaataacaacacaag

SEQ ID NO: 6775 - DNA, 23 bp, Artificial Sequence
  Description of Artificial Sequence: Synthetic oligonucleotide
tgggattttgtgagtatctttag

SEQ ID NO: 6776 - DNA, 23 bp, Artificial Sequence
  Description of Artificial Sequence: Synthetic oligonucleotide
aaaatttttttcctgactcaatt

SEQ ID NO: 6777 - DNA, 23 bp, Artificial Sequence
  Description of Artificial Sequence: Synthetic oligonucleotide
ttatttacaactcagctggtttg

SEQ ID NO: 6778 - DNA, 23 bp, Artificial Sequence
  Description of Artificial Sequence: Synthetic oligonucleotide
cttttctgtggatgaaaatgtaa

SEQ ID NO: 6779 - DNA, 23 bp, Artificial Sequence
  Description of Artificial Sequence: Synthetic oligonucleotide
agaccacagagtctactcctctc

SEQ ID NO: 6780 - DNA, 23 bp, Artificial Sequence
  Description of Artificial Sequence: Synthetic oligonucleotide
tttcattttcttactttccatga

SEQ ID NO: 6781 - DNA, 23 bp, Artificial Sequence
  Description of Artificial Sequence: Synthetic oligonucleotide
cttgacatttttcaaacacaatc

SEQ ID NO: 6782 - DNA, 23 bp, Artificial Sequence
  Description of Artificial Sequence: Synthetic oligonucleotide
tgctattgtttgcaagtttaatt

SEQ ID NO: 6783 - DNA, 24 bp, Artificial Sequence
  Description of Artificial Sequence: Synthetic oligonucleotide
tcacataagtacgagtgtctcatt

SEQ ID NO: 6784 - DNA, 23 bp, Artificial Sequence
  Description of Artificial Sequence: Synthetic oligonucleotide
cttgaatttctaaagtgcaatgt

SEQ ID NO: 6785 - DNA, 24 bp, Artificial Sequence
  Description of Artificial Sequence: Synthetic oligonucleotide
tagttttcacatgaagtgagaaga

SEQ ID NO: 6786 - DNA, 23 bp, Artificial Sequence
  Description of Artificial Sequence: Synthetic oligonucleotide
gattgtagatgacctacaacacc

SEQ ID NO: 6787 - DNA, 23 bp, Artificial Sequence
  Description of Artificial Sequence: Synthetic oligonucleotide
ctgaaacttcctacccactagac

SEQ ID NO: 6788 - DNA, 23 bp, Artificial Sequence
  Description of Artificial Sequence: Synthetic oligonucleotide
gttggagaattcgttaagtttgt

SEQ ID NO: 6789 - DNA, 23 bp, Artificial Sequence
  Description of Artificial Sequence: Synthetic oligonucleotide
atctctagaaaaggaactggaag

SEQ ID NO: 6790 - DNA, 23 bp, Artificial Sequence
  Description of Artificial Sequence: Synthetic oligonucleotide
gtactctaaaatgaggaggtgct

SEQ ID NO: 6791 - DNA, 24 bp, Artificial Sequence
  Description of Artificial Sequence: Synthetic oligonucleotide
attcctagtgtctgaaaatgaaag

SEQ ID NO: 6792 - DNA, 24 bp, Artificial Sequence
  Description of Artificial Sequence: Synthetic oligonucleotide
ctacaaatcataagcatgtcatct

SEQ ID NO: 6793 - DNA, 23 bp, Artificial Sequence
  Description of Artificial Sequence: Synthetic oligonucleotide
aatcctaattctccttcagaatc

SEQ ID NO: 6794 - DNA, 23 bp, Artificial Sequence
  Description of Artificial Sequence: Synthetic oligonucleotide
aggaaaggaaagttgtaacagaa

SEQ ID NO: 6795 - DNA, 23 bp, Artificial Sequence
  Description of Artificial Sequence: Synthetic oligonucleotide
gtgcacagctaagaaaatgagta

SEQ ID NO: 6796 - DNA, 23 bp, Artificial Sequence
  Description of Artificial Sequence: Synthetic oligonucleotide
gaaagaaaaaatcatcaaatgac

SEQ ID NO: 6797 - DNA, 23 bp, Artificial Sequence
  Description of Artificial Sequence: Synthetic oligonucleotide
tgaatttgaccattaaaaaaaat

SEQ ID NO: 6798 - DNA, 23 bp, Artificial Sequence
  Description of Artificial Sequence: Synthetic oligonucleotide
ggcttgaaaattcatctcttaat

SEQ ID NO: 6799 - DNA, 23 bp, Artificial Sequence
  Description of Artificial Sequence: Synthetic oligonucleotide
tcctgtcgtatctcatgaaatag

SEQ ID NO: 6800 - DNA, 23 bp, Artificial Sequence
  Description of Artificial Sequence: Synthetic oligonucleotide
atgaaaagagacagcagaagttt

SEQ ID NO: 6801 - DNA, 24 bp, Artificial Sequence
  Description of Artificial Sequence: Synthetic oligonucleotide
ctggacacatactattcaaacatc

SEQ ID NO: 6802 - DNA, 23 bp, Artificial Sequence
  Description of Artificial Sequence: Synthetic oligonucleotide
tctcacaaagtagacacacttga

SEQ ID NO: 6803 - DNA, 22 bp, Artificial Sequence
  Description of Artificial Sequence: Synthetic oligonucleotide
aggcttgactttctgtgtatgt

SEQ ID NO: 6804 - DNA, 23 bp, Artificial Sequence
  Description of Artificial Sequence: Synthetic oligonucleotide
ataacagcagcttcttaatgaaa

SEQ ID NO: 6805 - DNA, 22 bp, Artificial Sequence
  Description of Artificial Sequence: Synthetic oligonucleotide
ctgtgtcacttgtatctgagga

SEQ ID NO: 6806 - DNA, 22 bp, Artificial Sequence
  Description of Artificial Sequence: Synthetic oligonucleotide
caaccccttagtctgttagatg

SEQ ID NO: 6807 - DNA, 24 bp, Artificial Sequence
  Description of Artificial Sequence: Synthetic oligonucleotide
actctaatctctctaaatcatgcc

SEQ ID NO: 6808 - DNA, 24 bp, Artificial Sequence
  Description of Artificial Sequence: Synthetic oligonucleotide
tcctgctttatacaagtaatgtgt

SEQ ID NO: 6809 - DNA, 23 bp, Artificial Sequence
  Description of Artificial Sequence: Synthetic oligonucleotide
taaggaggtgatgtaactgagtt

SEQ ID NO: 6810 - DNA, 24 bp, Artificial Sequence
  Description of Artificial Sequence: Synthetic oligonucleotide
agaaatgtatgtctcagttgtgtt

SEQ ID NO: 6811 - DNA, 24 bp, Artificial Sequence
  Description of Artificial Sequence: Synthetic oligonucleotide
gtcataaataacagttggaacaaa

SEQ ID NO: 6812 - DNA, 22 bp, Artificial Sequence
  Description of Artificial Sequence: Synthetic oligonucleotide
atggaaatataaagggcagatc

SEQ ID NO: 6813 - DNA, 22 bp, Artificial Sequence
  Description of Artificial Sequence: Synthetic oligonucleotide
gaaaggaaaagatatctgcttg

SEQ ID NO: 6814 - DNA, 22 bp, Artificial Sequence
  Description of Artificial Sequence: Synthetic oligonucleotide
tagaaggaaacagaccacagac

SEQ ID NO: 6815 - DNA, 22 bp, Artificial Sequence
  Description of Artificial Sequence: Synthetic oligonucleotide
ttgttctcatacctctcatcct

SEQ ID NO: 6816 - DNA, 23 bp, Artificial Sequence
  Description of Artificial Sequence: Synthetic oligonucleotide
tccagagatcttacaggtttcta

SEQ ID NO: 6817 - DNA, 22 bp, Artificial Sequence
  Description of Artificial Sequence: Synthetic oligonucleotide
gaggtctttttgaagtcatttg

SEQ ID NO: 6818 - DNA, 24 bp, Artificial Sequence
  Description of Artificial Sequence: Synthetic oligonucleotide
ttgtgaggaatgtacatatactgc

SEQ ID NO: 6819 - DNA, 22 bp, Artificial Sequence
  Description of Artificial Sequence: Synthetic oligonucleotide
atactcctccacctgagatacc

SEQ ID NO: 6820 - DNA, 24 bp, Artificial Sequence
  Description of Artificial Sequence: Synthetic oligonucleotide
atacaggctctctatattccaatg

SEQ ID NO: 6821 - DNA, 22 bp, Artificial Sequence
  Description of Artificial Sequence: Synthetic oligonucleotide
agttactccctgcttggataat

SEQ ID NO: 6822 - DNA, 22 bp, Artificial Sequence
  Description of Artificial Sequence: Synthetic oligonucleotide
cagctaaggcttagtagtccag

SEQ ID NO: 6823 - DNA, 24 bp, Artificial Sequence
  Description of Artificial Sequence: Synthetic oligonucleotide
tgttaggtgtttaaacaagaatga

SEQ ID NO: 6824 - DNA, 23 bp, Artificial Sequence
  Description of Artificial Sequence: Synthetic oligonucleotide
ttgagtgtagctggattaagtgt

SEQ ID NO: 6825 - DNA, 23 bp, Artificial Sequence
  Description of Artificial Sequence: Synthetic oligonucleotide
gcagctgtaatgtgtagttcaat

SEQ ID NO: 6826 - DNA, 23 bp, Artificial Sequence
  Description of Artificial Sequence: Synthetic oligonucleotide
catagcccttatatttgctcttc

SEQ ID NO: 6827 - DNA, 23 bp, Artificial Sequence
  Description of Artificial Sequence: Synthetic oligonucleotide
atctcctttattggtttctcctc

SEQ ID NO: 6828 - DNA, 22 bp, Artificial Sequence
  Description of Artificial Sequence: Synthetic oligonucleotide
caggaatttcttgaaggaagat

SEQ ID NO: 6829 - DNA, 22 bp, Artificial Sequence
  Description of Artificial Sequence: Synthetic oligonucleotide
ctctttgcactttctaatcagc

SEQ ID NO: 6830 - DNA, 23 bp, Artificial Sequence
  Description of Artificial Sequence: Synthetic oligonucleotide
tttagccaaaacaacatattgtt

SEQ ID NO: 6831 - DNA, 22 bp, Artificial Sequence
  Description of Artificial Sequence: Synthetic oligonucleotide
gggtctgtagtcatacttctgg

SEQ ID NO: 6832 - DNA, 23 bp, Artificial Sequence
  Description of Artificial Sequence: Synthetic oligonucleotide
gactcctattcttcaataccagg

SEQ ID NO: 6833 - DNA, 24 bp, Artificial Sequence
  Description of Artificial Sequence: Synthetic oligonucleotide
tgtatgaattattagctcaggagg

SEQ ID NO: 6834 - DNA, 22 bp, Artificial Sequence
  Description of Artificial Sequence: Synthetic oligonucleotide
cctcagtaactgaaggacaaac

SEQ ID NO: 6835 - DNA, 23 bp, Artificial Sequence
  Description of Artificial Sequence: Synthetic oligonucleotide
ctgtttcctaacttctggataag

SEQ ID NO: 6836 - DNA, 24 bp, Artificial Sequence
  Description of Artificial Sequence: Synthetic oligonucleotide
agtcagacaggtctaggctattag

SEQ ID NO: 6837 - DNA, 22 bp, Artificial Sequence
  Description of Artificial Sequence: Synthetic oligonucleotide
cacagatgagacacaaggtaag

SEQ ID NO: 6838 - DNA, 23 bp, Artificial Sequence
  Description of Artificial Sequence: Synthetic oligonucleotide
tatagctatttccacatccattt

SEQ ID NO: 6839 - DNA, 24 bp, Artificial Sequence
  Description of Artificial Sequence: Synthetic oligonucleotide
tttgaggatgagtatttttttttt

SEQ ID NO: 6840 - DNA, 23 bp, Artificial Sequence
  Description of Artificial Sequence: Synthetic oligonucleotide
tgttctaccatgaacaggtctac

SEQ ID NO: 6841 - DNA, 22 bp, Artificial Sequence
  Description of Artificial Sequence: Synthetic oligonucleotide
gttgctgagtaaatagcagacc

SEQ ID NO: 6842 - DNA, 24 bp, Artificial Sequence
  Description of Artificial Sequence: Synthetic oligonucleotide
gcgtagaaggactaaaacagtact

SEQ ID NO: 6843 - DNA, 23 bp, Artificial Sequence
  Description of Artificial Sequence: Synthetic oligonucleotide
gtgaagtagggtaaggaataggg

SEQ ID NO: 6844 - DNA, 24 bp, Artificial Sequence
  Description of Artificial Sequence: Synthetic oligonucleotide
agcttccatagtcttgtctatttg

SEQ ID NO: 6845 - DNA, 23 bp, Artificial Sequence
  Description of Artificial Sequence: Synthetic oligonucleotide
ctggacacctctaagatcatagg

SEQ ID NO: 6846 - DNA, 24 bp, Artificial Sequence
  Description of Artificial Sequence: Synthetic oligonucleotide
aatgtattacattgaccagaaagg

SEQ ID NO: 6847 - DNA, 22 bp, Artificial Sequence
  Description of Artificial Sequence: Synthetic oligonucleotide
cctttcattaaagtccaaaaca

SEQ ID NO: 6848 - DNA, 22 bp, Artificial Sequence
  Description of Artificial Sequence: Synthetic oligonucleotide
ttcactctctagcctcattttc

SEQ ID NO: 6849 - DNA, 22 bp, Artificial Sequence
  Description of Artificial Sequence: Synthetic oligonucleotide
acaagaaggagaggaaaatgtt

SEQ ID NO: 6850 - DNA, 23 bp, Artificial Sequence
  Description of Artificial Sequence: Synthetic oligonucleotide
aaactagggtgggtctaaggtat

SEQ ID NO: 6851 - DNA, 22 bp, Artificial Sequence
  Description of Artificial Sequence: Synthetic oligonucleotide
ttaccatgactgacctgaattt

SEQ ID NO: 6852 - DNA, 22 bp, Artificial Sequence
  Description of Artificial Sequence: Synthetic oligonucleotide
agctttttaattcctatgaggc

SEQ ID NO: 6853 - DNA, 22 bp, Artificial Sequence
  Description of Artificial Sequence: Synthetic oligonucleotide
gtgaggtctgtagcaggataga

SEQ ID NO: 6854 - DNA, 22 bp, Artificial Sequence
  Description of Artificial Sequence: Synthetic oligonucleotide
ttaatgacaaacccagagactg

SEQ ID NO: 6855 - DNA, 24 bp, Artificial Sequence
  Description of Artificial Sequence: Synthetic oligonucleotide
tcctacatcctatccttaagaaac

SEQ ID NO: 6856 - DNA, 22 bp, Artificial Sequence
  Description of Artificial Sequence: Synthetic oligonucleotide
ggccatcttttaatccatattt

SEQ ID NO: 6857 - DNA, 22 bp, Artificial Sequence
  Description of Artificial Sequence: Synthetic oligonucleotide
tttctgactcttcctttcagac

SEQ ID NO: 6858 - DNA, 22 bp, Artificial Sequence
  Description of Artificial Sequence: Synthetic oligonucleotide
ttcaagaagaaatgcgtagaac

SEQ ID NO: 6859 - DNA, 23 bp, Artificial Sequence
  Description of Artificial Sequence: Synthetic oligonucleotide
tgtagactccatatcttgcactt

SEQ ID NO: 6860 - DNA, 22 bp, Artificial Sequence
  Description of Artificial Sequence: Synthetic oligonucleotide
gtgactcattacccagtcatgt

SEQ ID NO: 6861 - DNA, 22 bp, Artificial Sequence
  Description of Artificial Sequence: Synthetic oligonucleotide
acagagagtatgagggacttga

SEQ ID NO: 6862 - DNA, 24 bp, Artificial Sequence
  Description of Artificial Sequence: Synthetic oligonucleotide
tttctttaccactgttttctacac

SEQ ID NO: 6863 - DNA, 23 bp, Artificial Sequence
  Description of Artificial Sequence: Synthetic oligonucleotide
ggctgaatagtactccacataca

SEQ ID NO: 6864 - DNA, 22 bp, Artificial Sequence
  Description of Artificial Sequence: Synthetic oligonucleotide
acgactgtcagaaactgaattc

SEQ ID NO: 6865 - DNA, 23 bp, Artificial Sequence
  Description of Artificial Sequence: Synthetic oligonucleotide
gagaacttaaaatgtggctagtg

SEQ ID NO: 6866 - DNA, 22 bp, Artificial Sequence
  Description of Artificial Sequence: Synthetic oligonucleotide
agagaaggttaaaccctcacag

SEQ ID NO: 6867 - DNA, 22 bp, Artificial Sequence
  Description of Artificial Sequence: Synthetic oligonucleotide
gggttaaagcagataaacgaag

SEQ ID NO: 6868 - DNA, 23 bp, Artificial Sequence
  Description of Artificial Sequence: Synthetic oligonucleotide
ggttgtcaatccttaatttcttt

SEQ ID NO: 6869 - DNA, 25 bp, Artificial Sequence
  Description of Artificial Sequence: Synthetic oligonucleotide
gacagatctacaaggactctctaca

SEQ ID NO: 6870 - DNA, 23 bp, Artificial Sequence
  Description of Artificial Sequence: Synthetic oligonucleotide
caggtgatcagtagtgagtcatg

SEQ ID NO: 6871 - DNA, 25 bp, Artificial Sequence
  Description of Artificial Sequence: Synthetic oligonucleotide
gaaggtaagattgagatttgttaga

SEQ ID NO: 6872 - DNA, 22 bp, Artificial Sequence
  Description of Artificial Sequence: Synthetic oligonucleotide
aatacagccccagaatatcatt

SEQ ID NO: 6873 - DNA, 22 bp, Artificial Sequence
  Description of Artificial Sequence: Synthetic oligonucleotide
agtgttcctcacttagtcttgg

SEQ ID NO: 6874 - DNA, 24 bp, Artificial Sequence
  Description of Artificial Sequence: Synthetic oligonucleotide
cttcttctatctctactccttggg

SEQ ID NO: 6875 - DNA, 22 bp, Artificial Sequence
  Description of Artificial Sequence: Synthetic oligonucleotide
ggctgtttcctaataccttttt

SEQ ID NO: 6876 - DNA, 22 bp, Artificial Sequence
  Description of Artificial Sequence: Synthetic oligonucleotide
atattacttgcccaatctgtcc

SEQ ID NO: 6877 - DNA, 22 bp, Artificial Sequence
  Description of Artificial Sequence: Synthetic oligonucleotide
gaccagaattagagcctagctc

SEQ ID NO: 6878 - DNA, 23 bp, Artificial Sequence
  Description of Artificial Sequence: Synthetic oligonucleotide
aggatttaaacagctgaagaact

SEQ ID NO: 6879 - DNA, 23 bp, Artificial Sequence
  Description of Artificial Sequence: Synthetic oligonucleotide
ctactaaatcatagagccactgg

SEQ ID NO: 6880 - DNA, 22 bp, Artificial Sequence
  Description of Artificial Sequence: Synthetic oligonucleotide
cagacctgtgtgttaaacattg

SEQ ID NO: 6881 - DNA, 24 bp, Artificial Sequence
  Description of Artificial Sequence: Synthetic oligonucleotide
gttattttccaacaggagtcttac

SEQ ID NO: 6882 - DNA, 24 bp, Artificial Sequence
  Description of Artificial Sequence: Synthetic oligonucleotide
gtgatttcttttctgtagcttttt

SEQ ID NO: 6883 - DNA, 22 bp, Artificial Sequence
  Description of Artificial Sequence: Synthetic oligonucleotide
actcctgaaatctgaaacaaac

SEQ ID NO: 6884 - DNA, 22 bp, Artificial Sequence
  Description of Artificial Sequence: Synthetic oligonucleotide
gggataaatttcactttgtcgt

SEQ ID NO: 6885 - DNA, 22 bp, Artificial Sequence
  Description of Artificial Sequence: Synthetic oligonucleotide
tatgggaaagcttaataaaggg

SEQ ID NO: 6886 - DNA, 25 bp, Artificial Sequence
  Description of Artificial Sequence: Synthetic oligonucleotide
taattgcctctctaagataaaaagg

SEQ ID NO: 6887 - DNA, 22 bp, Artificial Sequence
  Description of Artificial Sequence: Synthetic oligonucleotide
agaggagggtgaatctaacaaa

SEQ ID NO: 6888 - DNA, 24 bp, Artificial Sequence
  Description of Artificial Sequence: Synthetic oligonucleotide
cttattttgtgaaatgtctcttca

SEQ ID NO: 6889 - DNA, 23 bp, Artificial Sequence
  Description of Artificial Sequence: Synthetic oligonucleotide
aataatttgtcaggccttttaaa

SEQ ID NO: 6890 - DNA, 22 bp, Artificial Sequence
  Description of Artificial Sequence: Synthetic oligonucleotide
atgttaggatatggccaagaat

SEQ ID NO: 6891 - DNA, 22 bp, Artificial Sequence
  Description of Artificial Sequence: Synthetic oligonucleotide
gatggctatattttgtaagccc

SEQ ID NO: 6892 - DNA, 23 bp, Artificial Sequence
  Description of Artificial Sequence: Synthetic oligonucleotide
aaaatcagaatagcacattcacc

SEQ ID NO: 6893 - DNA, 23 bp, Artificial Sequence
  Description of Artificial Sequence: Synthetic oligonucleotide
gagttctatttgctcctcagatg

SEQ ID NO: 6894 - DNA, 22 bp, Artificial Sequence
  Description of Artificial Sequence: Synthetic oligonucleotide
agcttcttgagatcgttcaact

SEQ ID NO: 6895 - DNA, 23 bp, Artificial Sequence
  Description of Artificial Sequence: Synthetic oligonucleotide
ggcattttaataaggttttacgt

SEQ ID NO: 6896 - DNA, 24 bp, Artificial Sequence
  Description of Artificial Sequence: Synthetic oligonucleotide
actaaaacagctcagtgagatacc

SEQ ID NO: 6897 - DNA, 23 bp, Artificial Sequence
  Description of Artificial Sequence: Synthetic oligonucleotide
aatctcatgttggcttgttacat

SEQ ID NO: 6898 - DNA, 23 bp, Artificial Sequence
  Description of Artificial Sequence: Synthetic oligonucleotide
tgtcagtaactttggttggatac

SEQ ID NO: 6899 - DNA, 23 bp, Artificial Sequence
  Description of Artificial Sequence: Synthetic oligonucleotide
ttacttgacatgggaatgtagac

SEQ ID NO: 6900 - DNA, 24 bp, Artificial Sequence
  Description of Artificial Sequence: Synthetic oligonucleotide
aaaaaataaatggaaacttccttt

SEQ ID NO: 6901 - DNA, 22 bp, Artificial Sequence
  Description of Artificial Sequence: Synthetic oligonucleotide
atgataaaacagcaaagcactg

SEQ ID NO: 6902 - DNA, 23 bp, Artificial Sequence
  Description of Artificial Sequence: Synthetic oligonucleotide
actcttgctctcacttctacctg

SEQ ID NO: 6903 - DNA, 24 bp, Artificial Sequence
  Description of Artificial Sequence: Synthetic oligonucleotide
tgtcaactcagacaactgtacttg

SEQ ID NO: 6904 - DNA, 25 bp, Artificial Sequence
  Description of Artificial Sequence: Synthetic oligonucleotide
taataaaatgacccaagtttgtatt

SEQ ID NO: 6905 - DNA, 23 bp, Artificial Sequence
  Description of Artificial Sequence: Synthetic oligonucleotide
ctgcttaagcttcttcagctatc

SEQ ID NO: 6906 - DNA, 22 bp, Artificial Sequence
  Description of Artificial Sequence: Synthetic oligonucleotide
aacctcagtccccttattattg

SEQ ID NO: 6907 - DNA, 22 bp, Artificial Sequence
  Description of Artificial Sequence: Synthetic oligonucleotide
tgatgccatactctggtaagag

SEQ ID NO: 6908 - DNA, 23 bp, Artificial Sequence
  Description of Artificial Sequence: Synthetic oligonucleotide
atgttaaattttgcatcatggta

SEQ ID NO: 6909 - DNA, 24 bp, Artificial Sequence
  Description of Artificial Sequence: Synthetic oligonucleotide
tatgttcacaatgttatgtaacca

SEQ ID NO: 6910 - DNA, 23 bp, Artificial Sequence
  Description of Artificial Sequence: Synthetic oligonucleotide
cagagtttgagaaccttcacaat

SEQ ID NO: 6911 - DNA, 21 bp, Artificial Sequence
  Description of Artificial Sequence: Synthetic oligonucleotide
aaaaacacatgtccaaacaag

SEQ ID NO: 6912 - DNA, 22 bp, Artificial Sequence
  Description of Artificial Sequence: Synthetic oligonucleotide
ctgttctaccctgcttctagaa

SEQ ID NO: 6913 - DNA, 21 bp, Artificial Sequence
  Description of Artificial Sequence: Synthetic oligonucleotide
cattgagacagacctctcctt

SEQ ID NO: 6914 - DNA, 23 bp, Artificial Sequence
  Description of Artificial Sequence: Synthetic oligonucleotide
caaagagtaagtccatcttttca

SEQ ID NO: 6915 - DNA, 22 bp, Artificial Sequence
  Description of Artificial Sequence: Synthetic oligonucleotide
gtaaacagtttgatggttcctc

SEQ ID NO: 6916 - DNA, 22 bp, Artificial Sequence
  Description of Artificial Sequence: Synthetic oligonucleotide
atcctgaaaggaaggtaagatt

SEQ ID NO: 6917 - DNA, 23 bp, Artificial Sequence
  Description of Artificial Sequence: Synthetic oligonucleotide
aaccatatcaggctctattctgt

SEQ ID NO: 6918 - DNA, 21 bp, Artificial Sequence
  Description of Artificial Sequence: Synthetic oligonucleotide
gctgccctattcacttctaag

SEQ ID NO: 6919 - DNA, 23 bp, Artificial Sequence
  Description of Artificial Sequence: Synthetic oligonucleotide
ctagttttctggaagttagggat

SEQ ID NO: 6920 - DNA, 23 bp, Artificial Sequence
  Description of Artificial Sequence: Synthetic oligonucleotide
aaaacagtttgagacagagaaag

SEQ ID NO: 6921 - DNA, 24 bp, Artificial Sequence
  Description of Artificial Sequence: Synthetic oligonucleotide
ttttatttaaaaacagcaacaaca

SEQ ID NO: 6922 - DNA, 22 bp, Artificial Sequence
  Description of Artificial Sequence: Synthetic oligonucleotide
cctactgtttcctgaagattcc

SEQ ID NO: 6923 - DNA, 25 bp, Artificial Sequence
  Description of Artificial Sequence: Synthetic oligonucleotide
aggaaggatatttaaaaacctaatt

SEQ ID NO: 6924 - DNA, 21 bp, Artificial Sequence
  Description of Artificial Sequence: Synthetic oligonucleotide
agactgattttctctgcttgg

SEQ ID NO: 6925 - DNA, 21 bp, Artificial Sequence
  Description of Artificial Sequence: Synthetic oligonucleotide
gggtccttcttcctgaatact

SEQ ID NO: 6926 - DNA, 21 bp, Artificial Sequence
  Description of Artificial Sequence: Synthetic oligonucleotide
ccacttggtgagaagaagatt

SEQ ID NO: 6927 - DNA, 24 bp, Artificial Sequence
  Description of Artificial Sequence: Synthetic oligonucleotide
aaatgaactacaggaaaatacatg

SEQ ID NO: 6928 - DNA, 22 bp, Artificial Sequence
  Description of Artificial Sequence: Synthetic oligonucleotide
agatgcagatcctgaagttttt

SEQ ID NO: 6929 - DNA, 25 bp, Artificial Sequence
  Description of Artificial Sequence: Synthetic oligonucleotide
caaaatagtttattgtgttcagaaa

SEQ ID NO: 6930 - DNA, 21 bp, Artificial Sequence
  Description of Artificial Sequence: Synthetic oligonucleotide
atttccaacttgcatatccat

SEQ ID NO: 6931 - DNA, 23 bp, Artificial Sequence
  Description of Artificial Sequence: Synthetic oligonucleotide
gggtctctgacacttagtaatgt

SEQ ID NO: 6932 - DNA, 21 bp, Artificial Sequence
  Description of Artificial Sequence: Synthetic oligonucleotide
ctagccctcttctgttttttc

SEQ ID NO: 6933 - DNA, 22 bp, Artificial Sequence
  Description of Artificial Sequence: Synthetic oligonucleotide
aacttcatctgtgaagctgtct

SEQ ID NO: 6934 - DNA, 21 bp, Artificial Sequence
  Description of Artificial Sequence: Synthetic oligonucleotide
aggtctaaaagaaaggaccct

SEQ ID NO: 6935 - DNA, 24 bp, Artificial Sequence
  Description of Artificial Sequence: Synthetic oligonucleotide
tttaaaccttgctacaaagtattc

SEQ ID NO: 6936 - DNA, 22 bp, Artificial Sequence
  Description of Artificial Sequence: Synthetic oligonucleotide
attgaagtcatttattatcggc

SEQ ID NO: 6937 - DNA, 23 bp, Artificial Sequence
  Description of Artificial Sequence: Synthetic oligonucleotide
gctagaccaaactgttctcaact

SEQ ID NO: 6938 - DNA, 21 bp, Artificial Sequence
  Description of Artificial Sequence: Synthetic oligonucleotide
ctgaaatgatacaagaccagc

SEQ ID NO: 6939 - DNA, 25 bp, Artificial Sequence
  Description of Artificial Sequence: Synthetic oligonucleotide
atttcatcaaatagagattcatttt

SEQ ID NO: 6940 - DNA, 22 bp, Artificial Sequence
  Description of Artificial Sequence: Synthetic oligonucleotide
agttctagaaactgctcccttc

SEQ ID NO: 6941 - DNA, 21 bp, Artificial Sequence
  Description of Artificial Sequence: Synthetic oligonucleotide
caagggaagttttttcatttt

SEQ ID NO: 6942 - DNA, 21 bp, Artificial Sequence
  Description of Artificial Sequence: Synthetic oligonucleotide
cactgctgagatagctctgtt

SEQ ID NO: 6943 - DNA, 23 bp, Artificial Sequence
  Description of Artificial Sequence: Synthetic oligonucleotide
tcaatctaggaacaagatttttc

SEQ ID NO: 6944 - DNA, 24 bp, Artificial Sequence
  Description of Artificial Sequence: Synthetic oligonucleotide
aatttgtagcttatcacaacatcc

SEQ ID NO: 6945 - DNA, 21 bp, Artificial Sequence
  Description of Artificial Sequence: Synthetic oligonucleotide
cagttccaatctgtaacttgc

SEQ ID NO: 6946 - DNA, 21 bp, Artificial Sequence
  Description of Artificial Sequence: Synthetic oligonucleotide
cagaacaggctgggttactat

SEQ ID NO: 6947 - DNA, 22 bp, Artificial Sequence
  Description of Artificial Sequence: Synthetic oligonucleotide
agcctagaaaagcttctgactc

SEQ ID NO: 6948 - DNA, 22 bp, Artificial Sequence
  Description of Artificial Sequence: Synthetic oligonucleotide
ctcatattcccttacaggtgtg

SEQ ID NO: 6949 - DNA, 24 bp, Artificial Sequence
  Description of Artificial Sequence: Synthetic oligonucleotide
agacgttagtctccatctctaacg

SEQ ID NO: 6950 - DNA, 21 bp, Artificial Sequence
  Description of Artificial Sequence: Synthetic oligonucleotide
tcctacacaggtgtcatcaga

SEQ ID NO: 6951 - DNA, 23 bp, Artificial Sequence
  Description of Artificial Sequence: Synthetic oligonucleotide
tgaaatagattaaattccccaag

SEQ ID NO: 6952 - DNA, 21 bp, Artificial Sequence
  Description of Artificial Sequence: Synthetic oligonucleotide
agataactctttccctccctg

SEQ ID NO: 6953 - DNA, 22 bp, Artificial Sequence
  Description of Artificial Sequence: Synthetic oligonucleotide
agaagtttccagaaatgtgtga

SEQ ID NO: 6954 - DNA, 22 bp, Artificial Sequence
  Description of Artificial Sequence: Synthetic oligonucleotide
taaagggtagaaatcagaaccc

SEQ ID NO: 6955 - DNA, 24 bp, Artificial Sequence
  Description of Artificial Sequence: Synthetic oligonucleotide
gctaaagaatgaatggaattactc

SEQ ID NO: 6956 - DNA, 25 bp, Artificial Sequence
  Description of Artificial Sequence: Synthetic oligonucleotide
actcatctattttgttctacctttt

SEQ ID NO: 6957 - DNA, 21 bp, Artificial Sequence
  Description of Artificial Sequence: Synthetic oligonucleotide
acagggactctgtcttcactt

SEQ ID NO: 6958 - DNA, 22 bp, Artificial Sequence
  Description of Artificial Sequence: Synthetic oligonucleotide
tgttgaaacactaggtggagaa

SEQ ID NO: 6959 - DNA, 21 bp, Artificial Sequence
  Description of Artificial Sequence: Synthetic oligonucleotide
actcacgtaccattttcaagc

SEQ ID NO: 6960 - DNA, 21 bp, Artificial Sequence
  Description of Artificial Sequence: Synthetic oligonucleotide
caggtaactggaatgagtcag

SEQ ID NO: 6961 - DNA, 23 bp, Artificial Sequence
  Description of Artificial Sequence: Synthetic oligonucleotide
aaactttcatccattacataacc

SEQ ID NO: 6962 - DNA, 21 bp, Artificial Sequence
  Description of Artificial Sequence: Synthetic oligonucleotide
gcaagtattgctttgttttcc

SEQ ID NO: 6963 - DNA, 23 bp, Artificial Sequence
  Description of Artificial Sequence: Synthetic oligonucleotide
ggagaagagtattctaggaggaa

SEQ ID NO: 6964 - DNA, 22 bp, Artificial Sequence
  Description of Artificial Sequence: Synthetic oligonucleotide
atttattctgctcttgatgagg

SEQ ID NO: 6965 - DNA, 22 bp, Artificial Sequence
  Description of Artificial Sequence: Synthetic oligonucleotide
tgtagcctctgaaagtagaggc

SEQ ID NO: 6966 - DNA, 23 bp, Artificial Sequence
  Description of Artificial Sequence: Synthetic oligonucleotide
aaataggaaaatgagttcaaagg

SEQ ID NO: 6967 - DNA, 21 bp, Artificial Sequence
  Description of Artificial Sequence: Synthetic oligonucleotide
caagcaaaaggcaagataaga

SEQ ID NO: 6968 - DNA, 22 bp, Artificial Sequence
  Description of Artificial Sequence: Synthetic oligonucleotide
gttggagtgtttgcacaattta

SEQ ID NO: 6969 - DNA, 21 bp, Artificial Sequence
  Description of Artificial Sequence: Synthetic oligonucleotide
tgtgatagacacacctgcaac

SEQ ID NO: 6970 - DNA, 24 bp, Artificial Sequence
  Description of Artificial Sequence: Synthetic oligonucleotide
aattaattaactgtcaataggctg

SEQ ID NO: 6971 - DNA, 22 bp, Artificial Sequence
  Description of Artificial Sequence: Synthetic oligonucleotide
tcttctttcttctcccaattgt

SEQ ID NO: 6972 - DNA, 24 bp, Artificial Sequence
  Description of Artificial Sequence: Synthetic oligonucleotide
gaggtactgaaatgagatgaattt

SEQ ID NO: 6973 - DNA, 21 bp, Artificial Sequence
  Description of Artificial Sequence: Synthetic oligonucleotide
tcctaaatttggtgagaaatg

SEQ ID NO: 6974 - DNA, 25 bp, Artificial Sequence
  Description of Artificial Sequence: Synthetic oligonucleotide
aacaacagtaagagtaagcaagtaa

SEQ ID NO: 6975 - DNA, 22 bp, Artificial Sequence
  Description of Artificial Sequence: Synthetic oligonucleotide
ctcctttcctctcctcagagat

SEQ ID NO: 6976 - DNA, 22 bp, Artificial Sequence
  Description of Artificial Sequence: Synthetic oligonucleotide
aggtcaacaatgacattaaacg

SEQ ID NO: 6977 - DNA, 21 bp, Artificial Sequence
  Description of Artificial Sequence: Synthetic oligonucleotide
ctgtatccctaacctcctgtg

SEQ ID NO: 6978 - DNA, 21 bp, Artificial Sequence
  Description of Artificial Sequence: Synthetic oligonucleotide
cttgcaaagtccaagatttct

SEQ ID NO: 6979 - DNA, 23 bp, Artificial Sequence
  Description of Artificial Sequence: Synthetic oligonucleotide
ctgaaatagtttgtggagacaca

SEQ ID NO: 6980 - DNA, 24 bp, Artificial Sequence
  Description of Artificial Sequence: Synthetic oligonucleotide
ttgactagagaatggatacttgag

SEQ ID NO: 6981 - DNA, 23 bp, Artificial Sequence
  Description of Artificial Sequence: Synthetic oligonucleotide
cggtcagtgttatagctcttaag

SEQ ID NO: 6982 - DNA, 22 bp, Artificial Sequence
  Description of Artificial Sequence: Synthetic oligonucleotide
aaaaaaaggatcaacgaaaata

SEQ ID NO: 6983 - DNA, 23 bp, Artificial Sequence
  Description of Artificial Sequence: Synthetic oligonucleotide
tcatatgtgctgttaatggaatt

SEQ ID NO: 6984 - DNA, 21 bp, Artificial Sequence
  Description of Artificial Sequence: Synthetic oligonucleotide
aagggcaagtaagatggaaag

SEQ ID NO: 6985 - DNA, 23 bp, Artificial Sequence
  Description of Artificial Sequence: Synthetic oligonucleotide
gacacaattaagggatgaaatct

SEQ ID NO: 6986 - DNA, 22 bp, Artificial Sequence
  Description of Artificial Sequence: Synthetic oligonucleotide
gattccatgagggaatactttc

SEQ ID NO: 6987 - DNA, 24 bp, Artificial Sequence
  Description of Artificial Sequence: Synthetic oligonucleotide
atctttttatcagacccaattatt

SEQ ID NO: 6988 - DNA, 22 bp, Artificial Sequence
  Description of Artificial Sequence: Synthetic oligonucleotide
ctgagtcaggatagagatgcct

SEQ ID NO: 6989 - DNA, 25 bp, Artificial Sequence
  Description of Artificial Sequence: Synthetic oligonucleotide
acacagttaaatgaacttgtctaac

SEQ ID NO: 6990 - DNA, 21 bp, Artificial Sequence
  Description of Artificial Sequence: Synthetic oligonucleotide
gtaaacgtggtgacaaggaaa

SEQ ID NO: 6991 - DNA, 23 bp, Artificial Sequence
  Description of Artificial Sequence: Synthetic oligonucleotide
atgttatgtagtccttcgtttgg

SEQ ID NO: 6992 - DNA, 24 bp, Artificial Sequence
  Description of Artificial Sequence: Synthetic oligonucleotide
ttgctaattaaaagtgatcttctg

SEQ ID NO: 6993 - DNA, 22 bp, Artificial Sequence
  Description of Artificial Sequence: Synthetic oligonucleotide
tgttcatggtctcaggctctat

SEQ ID NO: 6994 - DNA, 20 bp, Artificial Sequence
  Description of Artificial Sequence: Synthetic oligonucleotide
gtgctctcatccagagaatg

SEQ ID NO: 6995 - DNA, 21 bp, Artificial Sequence
  Description of Artificial Sequence: Synthetic oligonucleotide
caagagagggatccttctttc

SEQ ID NO: 6996 - DNA, 22 bp, Artificial Sequence
  Description of Artificial Sequence: Synthetic oligonucleotide
aaagaaaatgtagtatgcagcc

SEQ ID NO: 6997 - DNA, 25 bp, Artificial Sequence
  Description of Artificial Sequence: Synthetic oligonucleotide
aaaattatcaaactggattaaatgg

SEQ ID NO: 6998 - DNA, 23 bp, Artificial Sequence
  Description of Artificial Sequence: Synthetic oligonucleotide
gttttgagctgctaagttttaca

SEQ ID NO: 6999 - DNA, 21 bp, Artificial Sequence
  Description of Artificial Sequence: Synthetic oligonucleotide
tggtgacaggagagagaaatg

SEQ ID NO: 7000 - DNA, 26 bp, Artificial Sequence
  Description of Artificial Sequence: Synthetic oligonucleotide
acttgaaaaaactctttttactaaga

SEQ ID NO: 7001 - DNA, 23 bp, Artificial Sequence
  Description of Artificial Sequence: Synthetic oligonucleotide
cagttctctaccacttcctgtta

SEQ ID NO: 7002 - DNA, 21 bp, Artificial Sequence
  Description of Artificial Sequence: Synthetic oligonucleotide
tttatcactggagcctgtttg

SEQ ID NO: 7003 - DNA, 24 bp, Artificial Sequence
  Description of Artificial Sequence: Synthetic oligonucleotide
ttatgataaaaactctcagcaagc

SEQ ID NO: 7004 - DNA, 22 bp, Artificial Sequence
  Description of Artificial Sequence: Synthetic oligonucleotide
tgaagttagctggaagtaccag

SEQ ID NO: 7005 - DNA, 25 bp, Artificial Sequence
  Description of Artificial Sequence: Synthetic oligonucleotide
gttacacaaattagaaacaaatgtt

SEQ ID NO: 7006 - DNA, 21 bp, Artificial Sequence
  Description of Artificial Sequence: Synthetic oligonucleotide
acaaaaaaaaactttgggagg

SEQ ID NO: 7007 - DNA, 21 bp, Artificial Sequence
  Description of Artificial Sequence: Synthetic oligonucleotide
tttttgaaagggaaacaactg

SEQ ID NO: 7008 - DNA, 23 bp, Artificial Sequence
  Description of Artificial Sequence: Synthetic oligonucleotide
aagagattgatgtgaaagtctcg

SEQ ID NO: 7009 - DNA, 21 bp, Artificial Sequence
  Description of Artificial Sequence: Synthetic oligonucleotide
tagtgcgtgcatttagacaag

SEQ ID NO: 7010 - DNA, 24 bp, Artificial Sequence
  Description of Artificial Sequence: Synthetic oligonucleotide
gtactcctctcggttatagatgta

SEQ ID NO: 7011 - DNA, 22 bp, Artificial Sequence
  Description of Artificial Sequence: Synthetic oligonucleotide
gagccttgctttatatgtgttt

SEQ ID NO: 7012 - DNA, 20 bp, Artificial Sequence
  Description of Artificial Sequence: Synthetic oligonucleotide
gtcagtgtatggtgagggct

SEQ ID NO: 7013 - DNA, 24 bp, Artificial Sequence
  Description of Artificial Sequence: Synthetic oligonucleotide
cactaggtcctgaagatttgtatc

SEQ ID NO: 7014 - DNA, 20 bp, Artificial Sequence
  Description of Artificial Sequence: Synthetic oligonucleotide
cttggagacctcagagaagc

SEQ ID NO: 7015 - DNA, 20 bp, Artificial Sequence
  Description of Artificial Sequence: Synthetic oligonucleotide
gcttcttctccttccgagat

SEQ ID NO: 7016 - DNA, 24 bp, Artificial Sequence
  Description of Artificial Sequence: Synthetic oligonucleotide
aattaatacttccttggaacactg

SEQ ID NO: 7017 - DNA, 25 bp, Artificial Sequence
  Description of Artificial Sequence: Synthetic oligonucleotide
aataaaagatattggaaatattcga

SEQ ID NO: 7018 - DNA, 21 bp, Artificial Sequence
  Description of Artificial Sequence: Synthetic oligonucleotide
ctgcctctgttcaagtatcca

SEQ ID NO: 7019 - DNA, 23 bp, Artificial Sequence
  Description of Artificial Sequence: Synthetic oligonucleotide
ctgggggatcatttagatatagt

SEQ ID NO: 7020 - DNA, 21 bp, Artificial Sequence
  Description of Artificial Sequence: Synthetic oligonucleotide
gtgagaggagagaagaccaag

SEQ ID NO: 7021 - DNA, 24 bp, Artificial Sequence
  Description of Artificial Sequence: Synthetic oligonucleotide
ttttatttgcttctaatttgaaaa

SEQ ID NO: 7022 - DNA, 23 bp, Artificial Sequence
  Description of Artificial Sequence: Synthetic oligonucleotide
agtcacagatcattatgctttct

SEQ ID NO: 7023 - DNA, 25 bp, Artificial Sequence
  Description of Artificial Sequence: Synthetic oligonucleotide
tttaattggagatctacattaagct

SEQ ID NO: 7024 - DNA, 22 bp, Artificial Sequence
  Description of Artificial Sequence: Synthetic oligonucleotide
cacctgctagtcttcgatgtag

SEQ ID NO: 7025 - DNA, 25 bp, Artificial Sequence
  Description of Artificial Sequence: Synthetic oligonucleotide
ctcaaatttttttgagattaaaatt

SEQ ID NO: 7026 - DNA, 20 bp, Artificial Sequence
  Description of Artificial Sequence: Synthetic oligonucleotide
ccaggtttcagggcttattt

SEQ ID NO: 7027 - DNA, 20 bp, Artificial Sequence
  Description of Artificial Sequence: Synthetic oligonucleotide
tgcagaataagaaagggaac

SEQ ID NO: 7028 - DNA, 22 bp, Artificial Sequence
  Description of Artificial Sequence: Synthetic oligonucleotide
acaaatgctccttctgggatta

SEQ ID NO: 7029 - DNA, 19 bp, Artificial Sequence
  Description of Artificial Sequence: Synthetic oligonucleotide
aatgacgagaagcttcctg

SEQ ID NO: 7030 - DNA, 25 bp, Artificial Sequence
  Description of Artificial Sequence: Synthetic oligonucleotide
tgtttaaccatatactgcatagttt

SEQ ID NO: 7031 - DNA, 24 bp, Artificial Sequence
  Description of Artificial Sequence: Synthetic oligonucleotide
actgtcagtttaaattgctctagg

SEQ ID NO: 7032 - DNA, 26 bp, Artificial Sequence
  Description of Artificial Sequence: Synthetic oligonucleotide
taagtgtgttctgaatattattctga

SEQ ID NO: 7033 - DNA, 19 bp, Artificial Sequence
  Description of Artificial Sequence: Synthetic oligonucleotide
ccttcaagaaatccacagc

SEQ ID NO: 7034 - DNA, 19 bp, Artificial Sequence
  Description of Artificial Sequence: Synthetic oligonucleotide
aggaggcaatgaggagttc

SEQ ID NO: 7035 - DNA, 24 bp, Artificial Sequence
  Description of Artificial Sequence: Synthetic oligonucleotide
cacatttgttgctctttttattat

SEQ ID NO: 7036 - DNA, 20 bp, Artificial Sequence
  Description of Artificial Sequence: Synthetic oligonucleotide
tcgtctttcgagagtgactc

SEQ ID NO: 7037 - DNA, 23 bp, Artificial Sequence
  Description of Artificial Sequence: Synthetic oligonucleotide
attataggtatgagccattccac

SEQ ID NO: 7038 - DNA, 23 bp, Artificial Sequence
  Description of Artificial Sequence: Synthetic oligonucleotide
aagaacaagcaataacgtaacag

SEQ ID NO: 7039 - DNA, 24 bp, Artificial Sequence
  Description of Artificial Sequence: Synthetic oligonucleotide
gagggagagatacagatgaaataa

SEQ ID NO: 7040 - DNA, 23 bp, Artificial Sequence
  Description of Artificial Sequence: Synthetic oligonucleotide
ggaacctctttaatttgagaaat

SEQ ID NO: 7041 - DNA, 20 bp, Artificial Sequence
  Description of Artificial Sequence: Synthetic oligonucleotide
tgttctgtggtttgcgaaat

SEQ ID NO: 7042 - DNA, 20 bp, Artificial Sequence
  Description of Artificial Sequence: Synthetic oligonucleotide
aaagaggatgagggtcaagg

SEQ ID NO: 7043 - DNA, 20 bp, Artificial Sequence
  Description of Artificial Sequence: Synthetic oligonucleotide
tggggaccattatgagtcag

SEQ ID NO: 7044 - DNA, 19 bp, Artificial Sequence
  Description of Artificial Sequence: Synthetic oligonucleotide
ctcagtgcccagtgtcaag

SEQ ID NO: 7045 - DNA, 20 bp, Artificial Sequence
  Description of Artificial Sequence: Synthetic oligonucleotide
gaatgatgctgccagttcac

SEQ ID NO: 7046 - DNA, 22 bp, Artificial Sequence
  Description of Artificial Sequence: Synthetic oligonucleotide
ttcttcagttcttcctgcatac

SEQ ID NO: 7047 - DNA, 19 bp, Artificial Sequence
  Description of Artificial Sequence: Synthetic oligonucleotide
ttttcctttccaaccacgt

SEQ ID NO: 7048 - DNA, 26 bp, Artificial Sequence
  Description of Artificial Sequence: Synthetic oligonucleotide
caagtaattatatgctaaaaaagaga

SEQ ID NO: 7049 - DNA, 21 bp, Artificial Sequence
  Description of Artificial Sequence: Synthetic oligonucleotide
cgtgactggtgagtagtgctt

SEQ ID NO: 7050 - DNA, 23 bp, Artificial Sequence
  Description of Artificial Sequence: Synthetic oligonucleotide
gaaaaagagcttatttgctgatt

SEQ ID NO: 7051 - DNA, 25 bp, Artificial Sequence
  Description of Artificial Sequence: Synthetic oligonucleotide
ctatgttacgtcatttaatctcaca

SEQ ID NO: 7052 - DNA, 26 bp, Artificial Sequence
  Description of Artificial Sequence: Synthetic oligonucleotide
aacagcactaattattagagatatgc

SEQ ID NO: 7053 - DNA, 23 bp, Artificial Sequence
  Description of Artificial Sequence: Synthetic oligonucleotide
ataagaaacaattggctattgtt

SEQ ID NO: 7054 - DNA, 23 bp, Artificial Sequence
  Description of Artificial Sequence: Synthetic oligonucleotide
ttttgtttttcaaaattcagaaa

SEQ ID NO: 7055 - DNA, 21 bp, Artificial Sequence
  Description of Artificial Sequence: Synthetic oligonucleotide
agagattaaggggaaggtagg

SEQ ID NO: 7056 - DNA, 23 bp, Artificial Sequence
  Description of Artificial Sequence: Synthetic oligonucleotide
gtgcaaaacaataagtctcctta

SEQ ID NO: 7057 - DNA, 21 bp, Artificial Sequence
  Description of Artificial Sequence: Synthetic oligonucleotide
ctgtctgtccactgctgtaac

SEQ ID NO: 7058 - DNA, 25 bp, Artificial Sequence
  Description of Artificial Sequence: Synthetic oligonucleotide
gaattgaatttactcctcaaagtaa

SEQ ID NO: 7059 - DNA, 23 bp, Artificial Sequence
  Description of Artificial Sequence: Synthetic oligonucleotide
tttattaaaagcagagcttcatg

SEQ ID NO: 7060 - DNA, 25 bp, Artificial Sequence
  Description of Artificial Sequence: Synthetic oligonucleotide
tttatagttggctgataaatatgtg

SEQ ID NO: 7061 - DNA, 23 bp, Artificial Sequence
  Description of Artificial Sequence: Synthetic oligonucleotide
tgtatttattccagacctttctg

SEQ ID NO: 7062 - DNA, 19 bp, Artificial Sequence
  Description of Artificial Sequence: Synthetic oligonucleotide
atcccaacaaactggggtt

SEQ ID NO: 7063 - DNA, 24 bp, Artificial Sequence
  Description of Artificial Sequence: Synthetic oligonucleotide
atcaagagtataacattcctcttt

SEQ ID NO: 7064 - DNA, 23 bp, Artificial Sequence
  Description of Artificial Sequence: Synthetic oligonucleotide
gaaaataaattgctgttgctaga

SEQ ID NO: 7065 - DNA, 21 bp, Artificial Sequence
  Description of Artificial Sequence: Synthetic oligonucleotide
agctgctgaaattcctgaata

SEQ ID NO: 7066 - DNA, 25 bp, Artificial Sequence
  Description of Artificial Sequence: Synthetic oligonucleotide
ttttatattgccactatcttagaag

SEQ ID NO: 7067 - DNA, 20 bp, Artificial Sequence
  Description of Artificial Sequence: Synthetic oligonucleotide
ctcccaaatctgcttttctc

SEQ ID NO: 7068 - DNA, 25 bp, Artificial Sequence
  Description of Artificial Sequence: Synthetic oligonucleotide
cacagaagatattgaaaatatgaaa

SEQ ID NO: 7069 - DNA, 21 bp, Artificial Sequence
  Description of Artificial Sequence: Synthetic oligonucleotide
atctatctgcttggcctgact

SEQ ID NO: 7070 - DNA, 26 bp, Artificial Sequence
  Description of Artificial Sequence: Synthetic oligonucleotide
tcaattatcttttcttattttaactc

SEQ ID NO: 7071 - DNA, 25 bp, Artificial Sequence
  Description of Artificial Sequence: Synthetic oligonucleotide
ctaaaaaggaagaagtaaaattttc

SEQ ID NO: 7072 - DNA, 26 bp, Artificial Sequence
  Description of Artificial Sequence: Synthetic oligonucleotide
tgagttattaaaagtttttcaaaaca

SEQ ID NO: 7073 - DNA, 20 bp, Artificial Sequence
  Description of Artificial Sequence: Synthetic oligonucleotide
ctctgtgcctggttctgtag

SEQ ID NO: 7074 - DNA, 18 bp, Artificial Sequence
  Description of Artificial Sequence: Synthetic oligonucleotide
ctctgagattgggggctg

SEQ ID NO: 7075 - DNA, 23 bp, Artificial Sequence
  Description of Artificial Sequence: Synthetic oligonucleotide
aaaaacataagtgacttgatgga

SEQ ID NO: 7076 - DNA, 18 bp, Artificial Sequence
  Description of Artificial Sequence: Synthetic oligonucleotide
agaggcctgtggaagatg

SEQ ID NO: 7077 - DNA, 27 bp, Artificial Sequence
  Description of Artificial Sequence: Synthetic oligonucleotide
ttattattatttatagagtcttgctct

SEQ ID NO: 7078 - DNA, 22 bp, Artificial Sequence
  Description of Artificial Sequence: Synthetic oligonucleotide
ttcttcagctctctgaagtttc

SEQ ID NO: 7079 - DNA, 21 bp, Artificial Sequence
  Description of Artificial Sequence: Synthetic oligonucleotide
agaatcaaaacctgaggtgtt

SEQ ID NO: 7080 - DNA, 24 bp, Artificial Sequence
  Description of Artificial Sequence: Synthetic oligonucleotide
ggtaccataaagacttctagcaga

SEQ ID NO: 7081 - DNA, 25 bp, Artificial Sequence
  Description of Artificial Sequence: Synthetic oligonucleotide
actagaaaaagatcagaaaaattga

SEQ ID NO: 7082 - DNA, 23 bp, Artificial Sequence
  Description of Artificial Sequence: Synthetic oligonucleotide
gatcatcatcaaaacttatgtgg

SEQ ID NO: 7083 - DNA, 22 bp, Artificial Sequence
  Description of Artificial Sequence: Synthetic oligonucleotide
ttccttatccataaaatagggg

SEQ ID NO: 7084 - DNA, 24 bp, Artificial Sequence
  Description of Artificial Sequence: Synthetic oligonucleotide
ttctaagagaaggaaatctttctc

SEQ ID NO: 7085 - DNA, 23 bp, Artificial Sequence
  Description of Artificial Sequence: Synthetic oligonucleotide
ttcttgcttgagaatgataaact

SEQ ID NO: 7086 - DNA, 22 bp, Artificial Sequence
  Description of Artificial Sequence: Synthetic oligonucleotide
caaggtgttgattaaacttcag

SEQ ID NO: 7087 - DNA, 23 bp, Artificial Sequence
  Description of Artificial Sequence: Synthetic oligonucleotide
tacatgaagtgtctacaattggg

SEQ ID NO: 7088 - DNA, 23 bp, Artificial Sequence
  Description of Artificial Sequence: Synthetic oligonucleotide
aacctaaaagtgggaataacctc

SEQ ID NO: 7089 - DNA, 21 bp, Artificial Sequence
  Description of Artificial Sequence: Synthetic oligonucleotide
ttgactacaaagtggtcctcc

SEQ ID NO: 7090 - DNA, 24 bp, Artificial Sequence
  Description of Artificial Sequence: Synthetic oligonucleotide
aattcctttctcttatgatcaaac

SEQ ID NO: 7091 - DNA, 20 bp, Artificial Sequence
  Description of Artificial Sequence: Synthetic oligonucleotide
tcatctatggaatctccctg

SEQ ID NO: 7092 - DNA, 24 bp, Artificial Sequence
  Description of Artificial Sequence: Synthetic oligonucleotide
taattttgacacaggcataataac

SEQ ID NO: 7093 - DNA, 19 bp, Artificial Sequence
  Description of Artificial Sequence: Synthetic oligonucleotide
gttcaaccctttcaggagg

SEQ ID NO: 7094 - DNA, 19 bp, Artificial Sequence
  Description of Artificial Sequence: Synthetic oligonucleotide
ctgtggtaccttcctgtcc

SEQ ID NO: 7095 - DNA, 21 bp, Artificial Sequence
  Description of Artificial Sequence: Synthetic oligonucleotide
ctttgacctctcccattcttc

SEQ ID NO: 7096 - DNA, 19 bp, Artificial Sequence
  Description of Artificial Sequence: Synthetic oligonucleotide
catggtcaggttactgggg

SEQ ID NO: 7097 - DNA, 19 bp, Artificial Sequence
  Description of Artificial Sequence: Synthetic oligonucleotide
gtcagctcaaccccatgat

SEQ ID NO: 7098 - DNA, 20 bp, Artificial Sequence
  Description of Artificial Sequence: Synthetic oligonucleotide
ctcagtctccggagtgattg
